(19) United States
(12) Patent Application Publication
(10) Pub. No.: US 2025/0041367 A1
(43) Pub. Date: Feb. 6, 2025

(54) BACTERIOPHAGES AND USE THEREOF FOR THE TREATMENT OR PREVENTION OF INFECTION CAUSED BY E. COLI

(71) Applicant: Purdue Research Foundation, West Lafayette, IN (US)

(72) Inventors: Paul EBNER, West Lafayette, IN (US); Zafar HAYAT, Sargodha (PK); Shafiq ur REHMAN, Lahore (PK); Abdul HANNAN, West Lafayette, IN (US)

(21) Appl. No.: 18/793,898

(22) Filed: Aug. 4, 2024

Related U.S. Application Data
(60) Provisional application No. 63/530,660, filed on Aug. 3, 2023.

(51) Int. Cl. A61K 35/76; A61K 9/50; A61P 31/04; C12N 7/00

(52) U.S. Cl. CPC A61K 35/76; A61K 9/5036; A61P 31/04; C12N 7/00; C12N 2795/00021; C12N 2795/00032

(57) ABSTRACT

A composition of bacteriophages comprising at least one phage selected from AHP, AHC, AKA, MIA, MP1, and MP2, wherein the phages are optionally encapsulated; and a method for preventing or treating an infection or a disease caused by avian pathogenic E. coli by administering to a subject a prophylactically or therapeutically effective amount of the composition.

### CROSS REFERENCE TO RELATED APPLICATIONS

[0001] This application claims priority to U.S. provisional patent application No. 63/530,660, which was filed Aug. 3, 2023, and which is hereby incorporated by reference in its entirety.

### TECHNICAL FIELD

[0002] The present disclosure relates to a bacteriophage-based treatment for infections or diseases caused by E. coli. Particularly, the disclosure relates to compositions of bacteriophages and their use for preventing or treating an infectious disease, such as a disease caused by avian pathogenic E. coli (APEC) in poultry.

### SEQUENCE LISTING

[0003] A computer-readable form (CRF) of the Sequence Listing is submitted with this application. The sequence listing is entitled 70146-02_SEQ_LISTING.xml, was generated on Jul. 29, 2024 and is 673,128 bytes in size. The entire content of the sequence listing is incorporated herein by reference in its entirety.

### BACKGROUND

[0004] Non-pathogenic E. coli resides in the gastrointestinal tracts of most animals and is generally considered a commensal organism. Some serotypes, however, are pathogenic, and infections with these serotypes typically result in diarrheal disease. Certain types of E. coli are considered highly pathogenic and can cause enterohemorrhagic fever, renal failure, and, in some cases, death. Some E. coli are species-specific, meaning that their pathogenicity is heightened in certain host species. Avian pathogenic E. coli (APEC) is a species-specific E. coli that causes disease in poultry. APEC serotypes, for example, 078, 01, 02, and 05, are commonly associated with APEC infections in poultry.

[0005] APEC predominantly colonizes the small intestine of birds, and may cause both systemic and localized infections. Acute APEC infections are characterized by septicemia, while subacute infections may manifest as airsacculitis (air sac infection), perihepatitis (liver infection), or salpingitis (oviduct infection). APEC may also cause egg peritonitis, skin infections, and coligranuloma (Apostolakos et al., 2021, Frontiers in Veterinary Science, 8, 1040). Infections caused by APEC are collectively referred to as avian colibacillosis. Colibacillosis can result in bird mortality rates of 20% to 50% and beyond, depending on the age of the birds at the time of infection, and causes significant economic loss to poultry industries worldwide. Colibacillosis is usually controlled using antibiotics. Unlike many bacterial infections, there are no vaccines available for colibacillosis due to the diversity of APEC O-serotypes.

[0006] The use of antibiotics in food animal production for any reason (e.g., for disease treatment, growth promotion, etc.) can lead to the development and spread of antibiotic resistance in bacterial populations, resulting in a reduction in the efficacy of the antibiotic in question. Antibiotics can also accumulate in animal tissues before being excreted. The presence of antibiotic residues in animal tissues may lead to regular, albeit low dose, exposure to antibiotics within human populations, potentially disrupting microbial communities and leading to further antimicrobial resistance. The continued emergence of antibiotic resistance has resulted in the prohibition of the use of some antibiotics in poultry production in several countries and an increase in calls to limit the use of antibiotics. Reducing the use of antibiotics in food animal production has been targeted as one way to effectively limit the use of antibiotics and combat the spread of antibiotic resistance.

[0007] Therefore, there is a need to develop an alternative treatment to antibiotics to prevent and control serious avian pathogenic E. coli infections or diseases in animals raised for food, such as poultry. It is an object of the present disclosure to provide such an alternative treatment. This and other objects and advantages, as well as inventive features, will be apparent from the detailed description.

### SUMMARY

[0008] Six avian pathogenic E. coli (APEC) phages were isolated from untreated wastewater samples from wastewater treatment plants in central Indiana (USA), livestock/poultry waste samples from the Purdue University Animal Sciences Research and Education Center (West Lafayette, IN, USA). The phages were characterized and named as vB_Eco_AHP (AHP), vB_Eco_AHC (AHC), vB_Eco_AKA (AKA), vB_Eco_MIA (MIA), vB_Eco_MP_1 (MP1), and vB_Eco_MP_2 (MP2).

[0009] Provided is a bacteriophage composition for preventing or treating an infection or a disease caused by APEC comprising an effective amount of at least one phage selected from AHP, AHC, AKA, MIA, MP1, and MP2, wherein at least one phage is optionally encapsulated.

[0010] In some embodiments, the bacteriophage composition comprises phages AHP, AHC, AKA, MIA, MP1, and MP2.

[0011] Provided is a bacteriophage composition for preventing or treating an infection or a disease caused by avian pathogenic E. coli (APEC) comprising an effective amount of at least one isolated phage selected from vB_Eco_AHP (AHP) having a genome comprising a nucleotide sequence of SEQ ID NO: 1, vB_Eco_AHC (AHC) having a genome comprising a nucleotide sequence of SEQ ID NO: 2, vB_Eco_AKA (AKA) having a genome comprising a nucleotide sequence of SEQ ID NO: 3, vB_Eco_MIA (MIA) having a genome comprising a nucleotide sequence of SEQ ID NO: 4, vB_Eco_MP_1 (MP1) having a genome comprising a nucleotide sequence of SEQ ID NO: 5, and vB_Eco_MP_2 (MP2) having a genome comprising a nucleotide sequence of SEQ ID NO: 6, wherein at least one phage is optionally encapsulated.

[0012] In some embodiments, the bacteriophage composition comprises phages AHP, AHC, AKA, MIA, MP1, and MP2 comprising the nucleotide sequence of SEQ ID Nos: 1 to 6, respectively.

[0013] The phages can be encapsulated using synthetic or natural polymers. In exemplary embodiments, the encapsulated phages are encapsulated with natural polymers. Examples of natural polymers include, but are not limited to, sodium alginate, chitosan, gum, gelatin, collagen, or a combination of two or more thereof. Desirably, the natural polymer can be sodium alginate. In some embodiments, the composition comprises encapsulated and unencapsulated phages in a ratio of about 1:1.

[0014] A method for preventing or treating an infection or a disease caused by APFC is also provided. The method comprises administering to a subject a prophylactically or therapeutically effective amount of a bacteriophage composition comprising at least one phage selected from AHP, AHC, AKA, MIA, MP1, and MP2, wherein at least one phage is optionally encapsulated. In exemplary embodiments, the subject is poultry. In exemplary embodiments, the disease caused by APEC infections is colibacillosis.

[0015] The prophylactically or therapeutically effective amount of the bacteriophage composition can be administered orally, topically, intratracheally, intramuscularly, or subcutaneously to the subject. The composition can be administered in the form of a suspension, through feed, water, an oral gavage, a spray, or an injection over a period of time ranging from about 1 day to 60 days. The composition can also be administered in ovo. In some embodiments, the prophylactically or therapeutically effective amount is from about 10 PFU to about 10¹³ PFU of each phage per mL of composition, in volumes between 0.1 mL to 5 mL per bird per treatment.

[0016] Further provided is a method for preventing or treating an infection caused by APEC comprising administering to a subject a prophylactically or therapeutically effective amount of a bacteriophage composition described herein above.

### BRIEF DESCRIPTION OF THE DRAWINGS

[0017] The present disclosure will be more readily understood from the detailed description of embodiments presented below considered in conjunction with the attached drawings of which:

[0018] FIG. 1 shows the lytic capacity of phages MP1, AHP, MP2, MIA, AKA, and AHC against the avian pathogenic E. coli (APEC) serotypes for which they are lytic. Asterisks (*) indicate significant difference at P<0.05. Statistical comparisons are within time points.

[0019] FIG. 2 shows the lytic capacity of a bacteriophage composition comprising phages MP1 AHP, MP2, MIA, AKA, and AHC and compares the effect of this phage treatment on APEC growth in a liquid medium with the effects of various antibiotics. Asterisks * indicate significant difference at P<0.05. Statistical comparisons are within time points.

[0020] FIG. 3 shows the effect of simulated gastric fluid (SGF) on the viability of unencapsulated phages MP1, MP2, AKA, MIA, AHP, and AHC over time. Concentrations of unencapsulated phages exposed to simulated gastric fluid (SGF, grey bars) were significantly lower than those of unencapsulated phages exposed to a 1×PBS control solution (black bars). Asterisks * indicate a significant difference at P<0.05, while “ns” indicates no significant difference. Statistical comparisons are within time points.

[0021] FIG. 4 shows the viability of encapsulated phages MP1, MP2, AKA, AHP, MIA, and AHC after exposure to SGF over time. Concentrations of encapsulated phages exposed to SGF (grey bars) for 15, 30, or 60 minutes were not found to significantly differ from those of encapsulated phages exposed to a 1×PBS control solution for the same length of time. Concentrations of encapsulated phages exposed to SGF for 90 minutes were found to be significantly lower than those of encapsulated phages exposed to a 1×PBS control solution for 90 minutes. Asterisks * indicate a significant difference at P<0.05, while “ns” indicates no significant difference. Statistical comparisons are within time points.

[0022] FIG. 5 shows the effect of simulated intestinal fluid (SIF) on the viability of unencapsulated phages MP1, MP2, AKA, AHP, MIA, and AHC over time. Except in the case of MP1, concentrations of unencapsulated phages exposed to SIF (grey bars) were not found to differ significantly from concentrations of unencapsulated phages exposed to a 1×PBS control solution at any time point. Asterisks * indicate a significant difference at P<0.05, while “ns” indicates no significant difference. Statistical comparisons are within time points.

[0023] FIG. 6 shows the concentrations of phages MP1, MP2, AKA, AHP, MIA, and AHC released from sodium alginate microcapsules after exposure to SIF for 1, 2, or 3 hours (all microcapsules were exposed to SGF for 1 hour before being exposed to SIF). Substantial concentrations of all phages were released from microcapsules after one hour of incubation in SIF. Except in the case of AHP, the concentrations of released phages increased significantly between 1 and 2 hours of incubation with SIF. Across all phage types, no significant difference was observed between the concentration of released phages after three hours of incubation with SIF and the concentration of released phages after two hours of incubation. Asterisks * indicate a significant difference at P<0.05, while “ns” indicates no significant difference.

### DETAILED DESCRIPTION

[0024] For the purposes of promoting an understanding of the principles of the present disclosure, reference will now be made to the embodiments illustrated in the drawings, and specific language will be used to describe the same. It will nevertheless be understood that no limitation of the scope of the claimed invention is thereby intended by the description of these embodiments. On the contrary, this disclosure is intended to cover alternatives, modifications, and equivalents as may be included within the spirit and scope of this application. As previously noted, while this technology may be illustrated and described in one or more preferred embodiments, the compositions, and methods hereof may vary.

[0025] The terms “bacteriophage,” “phage,” “bacteriophages,” and “phages” are used to refer to a functional phage particle or particles, respectively, comprising a nucleic acid genome packaged in a proteinaceous envelope or capsid. The term also refers to portions of the bacteriophage, including, e.g., a head portion, an assembly of phage components or other phage proteins, which provide substantially the same functional activity as the bacteriophage in its entirety.

[0026] The term “lytic activity” designates the property of a bacteriophage to cause the lysis of a bacterial cell.

[0027] The term “PFU” means “plaque forming unit” and refers to the number of virus particles capable of forming plaques per unit volume, as it is well defined in the art. Lytic bacteriophages lyse the host cell, causing a zone of clearing (or plaque) on a culture plate. Theoretically, each plaque is formed by one phage, and the number of plaques multiplied by the dilution factor is equal to the total number of phages in a given test preparation.

[0028] The term “composition of bacteriophages” refers to a composition of bacteriophages, which can be the same or different. A composition comprises at least one of vB_Eco_AHP (AHP), vB_Eco_AHC (AHC), vB_Eco_AKA (AKA), vB_Eco_MIA (MIA), and vB_Eco_MP_1 (MP1) and vB_Eco_MP_2 (MP2). The composition can comprise two, three, four, five, or all six, phages, such as MP1, MP2, AKA, AHP, MIA and AHC, MP1 and MP2, MP1 and AKA, MP1 and AHP, MP1 and MIA, MP1 and AHC, MP2 and AKA, MP2 and AHP, MP2 and MIA, MP2 and AHC, AKA and AHP, AKA and MIA, AKA and AHC, AHP and MIA, AHP and AHC and MIA and AHC. Other examples of combinations include, but are not limited to, MP1, MP2, and AKA; MP2, AKA, and AHP; AKA, AHP, and MIA; or AHP, MIA, and AHC. Yet other examples of combinations include, but are not limited to, MP1, MP2, AKA, and AHO; MP2, AKA, AHP, and MIA; AKA, AHP, MIA and AHC; MP1, AKA, AHP, and MIA; MP1, AHP, MIA, and AHC; MP2, AKA, AHP, MIA, and AHC; Still yet other examples of combinations include, but are not limited to, MP1, MP2, AKA, AHP, and MIA; and MP1, MP2, AKA, AHP, MIA and AHC. All permutations of combinations are contemplated and encompassed. The bacteriophages in a cocktail/composition can be, and preferably are, formulated together, i.e., in a same vessel or packaging, although they can be prepared as parts of kits in which the (or some of the) bacteriophages are formulated or packaged separately and combined when used or administered.

[0029] The term “poultry” means any domesticated bird used for food. Varieties include chicken, turkey, geese, ducks, Rock Cornish hens, and game birds such as pheasant, squab, and guinea fowl. Also included are large birds such as ostriches, emus, and rheas (ratites).

[0030] The term “treating” is intended to encompass prophylactic treatment as well as a therapeutic treatment.

[0031] Bacteriophages are natural predators of bacteria and are highly host specific. Phages can reproduce themselves and kill their bacterial hosts using the host cell's machinery during the lytic phase of their life cycle. Bacteriophages can be simple to isolate and easily propagated. They can have a long shelf life, increasing the potential for affordable scale-up of bacteriophage-based treatment. The phages can be susceptible to various environmental conditions, including temperature and pH. These environmental factors are important in considering bacteriophage-based treatment, as each factor can reduce phage viability and activity. This is true for the production, storage, and application of phages.

[0032] Provided is a bacteriophage composition for preventing or treating an infection or a disease caused by avian pathogenic E. coli (APEC). The bacteriophage composition comprises an effective amount of at least one phage selected from vB_Eco_AHP (AHP), vB_Eco_AHC (AHC), vB_Eco_AKA (AKA), vB_Eco_MIA (MIA), vB_Eco_MP_1 (MP1), and vB_Eco_MP_2 (MP2), wherein at least one phage is optionally encapsulated. Some or all of one type of phage can be encapsulated or, when two or more types of phages are combined, some or all of one type of phage can be encapsulated and none of the other type can be encapsulated (i.e., unencapsulated), some or all of every type of phage can be encapsulated, or all of one type can be encapsulated and none of the other type can be encapsulated (i.e., unencapsulated). Any and all permutations of encapsulation/un-encapsulation are contemplated and encompassed.

[0033] Provided are encapsulated phages suitable for preventing and treating the infections or diseases caused by APEC in a subject, such as poultry. The phages can be protected by encapsulating them with natural or synthetic polymers. The phages can be encapsulated to protect them from gastric fluid (GF) and therefore are suitable for oral delivery. These polymers protect phages from harsh acidic conditions, which potentially lead to phage inactivation or loss of phage viability. These polymeric encapsulation materials also protect encapsulated phages from low pH levels, digestive enzymes, and bile juices, allowing phages to remain viable during passage through the upper gastrointestinal tract following oral administration. Encapsulation allows the controlled release of phages. After the phages are released, they can enter the lower gastrointestinal tract, where conditions are less detrimental to phage viability, and there adhere to and lyse susceptible host bacteria.

[0034] The suitable polymers can be natural polymers. Examples of natural polymers that can be used for encapsulation include, but are not limited to, sodium alginate, chitosan, gums, gelatin, collagen, or a combination of two or more thereof. The natural polymer can be sodium alginate. The phages can be microencapsulated using sodium alginate and CaCl₂).

[0035] In certain embodiments, the bacteriophage composition can comprise a combination of two or more phages selected from AHP, AHC, AKA, MIA, MP1, and MP2, wherein phages are optionally encapsulated. In certain embodiments, the bacteriophage composition can comprise an effective amount of phages AHP, AHC, AKA, MIA, MP1, and MP2, wherein the phages are unencapsulated. In certain embodiments, the bacteriophage composition can comprise an effective amount of phages AHP, AHC, AKA, MIA, MP1, and MP2, wherein the phages are encapsulated.

[0036] Provided is a bacteriophage composition for preventing or treating an infection or a disease caused by avian pathogenic E. coli (APEC) comprising an effective amount of at least one isolated phage selected from vB_Eco_AHP (AHP) having a genome comprising a nucleotide sequence of SEQ ID NO: 1, vB_Eco_AHC (AHC) having a genome comprising a nucleotide sequence of SEQ ID NO: 2, vB_Eco_AKA (AKA) having a genome comprising a nucleotide sequence of SEQ ID NO: 3, vB_Eco_MIA (MIA) having a genome comprising a nucleotide sequence of SEQ ID NO: 4, vB_Eco_MP_1 (MP1) having a genome comprising a nucleotide sequence of SEQ ID NO: 5, and vB_Eco_MP_2 (MP2) having a genome comprising a nucleotide sequence of SEQ ID NO: 6, wherein at least one phage is optionally encapsulated.

[0037] In some embodiments, the bacteriophage composition comprises phages AHP, AHC, AKA, MIA, MP1, and MP2 comprising the nucleotide sequence of SEQ ID Nos: 1 to 6, respectively.

[0038] In some embodiments, AHP having a genome comprising a nucleotide sequence of SEQ ID NO: 1. In some embodiments, AHC having a genome comprising a nucleotide sequence of SEQ ID NO: 2. In some embodiments, AKA having a genome comprising a nucleotide sequence of SEQ ID NO: 3. In some embodiments, MIA having a genome comprising a nucleotide sequence of SEQ ID NO: 4. In some embodiments, MP1 having a genome comprising a nucleotide sequence of SEQ ID NO: 5. In some embodiments, MP2 having a genome comprising a nucleotide sequence of SEQ ID NO: 6.

[0039] In some embodiments, AHP comprises a genome comprising a sequence as set forth in SEQ ID NO: 1 or having at least 95% identity, more preferably 96%, 97%, 98% or 99% identity to SEQ ID NO: 1. In some embodiments, AHC comprises a genome comprising a sequence as set forth in SEQ ID NO: 2 or having at least 95% identity, more preferably 96%, 97%, 98% or 99% identity to SEQ ID NO: 2. In some embodiments, AKA comprises a genome comprising a sequence as set forth in SEQ ID NO: 3 or having at least 95% identity, more preferably 96%, 97%, 98% or 99% identity to SEQ ID NO: 3. In some embodiments, MIA comprises a genome comprising a sequence as set forth in SEQ ID NO: 4 or having at least 95% identity, more preferably 96%, 97%, 98% or 99% identity to SEQ ID NO: 4. In some embodiments, MP1 comprises a genome comprising a sequence as set forth in SEQ ID NO: 5 or having at least 95% identity, more preferably 96%, 97%, 98% or 99% identity to SEQ ID NO: 5. In some embodiments, MP2 comprises a genome comprising a sequence as set forth in SEQ ID NO: 6 or having at least 95% identity, more preferably 96%, 97%, 98% or 99% identity to SEQ ID NO: 6.

[0040] The composition comprises the encapsulated and unencapsulated phages in various ratios. In certain embodiments, the encapsulated and unencapsulated phages are in a ratio of about 1:1, in which case the encapsulated phage can be of a single type of phage or a combination of phages, in which case less than all of a given type of phage can be encapsulated or all of a given type of phage can be encapsulated. When a combination of phages is encapsulated, the degree to which one type of phage is encapsulated can be the same as, or different from, the degree of encapsulation of one or more other types of phage(s) in the combination.

[0041] The bacteriophage composition comprising a combination of encapsulated and unencapsulated phages can acts in such a way that the unencapsulated phages can be immediately active after administration i.e. active in pre-stomach portions of the digestive tract, and the encapsulated phages can be protected until they pass through the stomach. After which point the phages can be released from encapsulation, and act at the intestinal sites of infection (i.e., act in the hindgut).

[0042] A method for preventing or treating an infection or a disease caused by APEC is further provided. The method can comprise administering to a subject a prophylactically or therapeutically effective amount of a bacteriophage composition comprising at least one phage selected from AHP, AHC, AKA, MIA, MP1, and MP2, wherein at least one phage is optionally encapsulated.

[0043] In certain embodiments, the composition can comprises the phages AHP, AHC, AKA, MIA, MP1, and MP2, wherein the phages are optionally encapsulated. The bacteriophage composition can comprises a combination of encapsulated phages and unencapsulated phages in a ratio of about 1:1. In certain embodiments, the composition can comprise the phages AHP having a genome comprising a nucleotide sequence of SEQ ID NO: 1, AHC having a genome comprising a nucleotide sequence of SEQ ID NO: 2, AKA having a genome comprising a nucleotide sequence of SEQ ID NO: 3, MIA having a genome comprising a nucleotide sequence of SEQ ID NO: 4, MP1 having a genome comprising a nucleotide sequence of SEQ ID NO: 5, and MP2 having a genome comprising a nucleotide sequence of SEQ ID NO: 6, wherein the phages are optionally encapsulated.

[0044] Another method for preventing or treating an infection or a disease caused by APEC is provided. The method can comprise administering to a subject a prophylactically or therapeutically effective amount of a bacteriophage composition comprising phages AHP, AHC, AKA, MIA, MP1, and MP2, wherein at least one phage is optionally encapsulated. The bacteriophage composition can comprise a combination of encapsulated phages and unencapsulated phages in a ratio of about 1:1.

[0045] Further provided is a method of preventing or treating an infection or a disease caused by APEC. The method comprises administering to a subject a prophylactically or therapeutically effective amount of (i) a bacteriophage composition described herein and (ii) one or more other prophylactic or therapeutic agents. The other prophylactic or therapeutic agent can be any suitable prophylactic or therapeutic agent. In exemplary embodiments, the other prophylactic or therapeutic agent can be a suitable antibiotic agent, such as an antibiotic agent selected from the antibiotic agents known to prevent or treat an infection caused by APEC.

[0046] Examples of antibiotic agents include, but are not limited to, ampicillin, doxycycline, neomycin, tilmicosin, amoxicillin, enrofloxacin, ciprofloxacin, norfloxacin, streptomycin, gentamycin, kanamycin, neomycin, cefotoxamin, tetracycline, and sulfomethoxazole.

[0047] The other prophylactic or therapeutic agent(s) can be administered simultaneously or sequentially, by the same or a different route, to achieve the desired effect. When administered sequentially, the bacteriophage composition can be administered first, and the other prophylactic or therapeutic agent(s) can be administered second, or vice versa. The bacteriophage composition described herein and one or more other prophylactic or therapeutic agents can be administered from a single composition or as two or more separate compositions, such as by the same or different routes. The prophylactic or therapeutic agent is administered in an amount to provide its desired prophylactic or therapeutic effect. The effective dosage range for each prophylactic or therapeutic agent is well-known in the art or can be determined in accordance with dosage range-determining methods known to those of ordinary skill in the art, and the prophylactic or therapeutic agent can be administered to a subject in need thereof within such established ranges. The bacteriophage composition described herein, and one or more other prophylactic or therapeutic agents can be administered together as a single unit dose or separately as multi-unit doses, wherein the bacteriophage composition can be administered before the other prophylactic or therapeutic agent(s) or vice versa. One or more doses of the composition and/or one or more doses of the prophylactic or therapeutic agent can be administered.

[0048] The treatments using the bacteriophage composition comprising the combination of phages can increase the spectrum of the treatment by providing more coverage across different APEC serotypes and thus can have a higher potential to control bacterial growth. Additionally, it can reduce the impacts of phage resistance as there would be a lower probability of a bacterial strain developing resistance simultaneously against multiple distinct phages in the treatment.

[0049] A “subject” can be any animal susceptible to infection with APEC, such as poultry. Example of poultry includes, but are not limited to, domesticated birds such as chickens, ducks, turkeys, geese, or Rock Cornish hens; game birds such as pheasant, squabs, guinea fowl, peafowl, grouse, or quail; and large birds such as ostriches, emus or rheas. In exemplary embodiments, the subject can be a chicken.

[0050] An infection caused by APEC result in colibacillosis. Colibacillosis includes extra-intestinal bacterial infections, salpingitis (infection of fallopian tubes), pericarditis, perihepatitis (liver infection), airsacculitis (air sac infection), egg peritonitis, septicemia, skin infections, and coligranuloma.

[0051] In certain embodiments, the bacteriophage composition is formulated in which the bacteriophage is present in an amount to provide a multiplicity of infection (MOI; as determined by the concentration of plaque forming units (PFU) relative to the concentration of bacteria) of about 0.01 to about 1000 upon administration of the composition to a subject in need thereof. In certain embodiments, the concentration of one or more bacteriophage(s) can be combined to form a composition comprising at least about 10 PFU to about 10¹³ PFU per mL of composition, such as from about 10 PFU to 10¹³ PFU or 10 PFU to about 10¹³ PFU of each phage per mL of composition. In certain embodiments, the total concentration of all bacteriophages within the composition can be between about 10 and about 10¹³ PFU per mL of preparation. In certain embodiments, the concentration of the individual bacteriophage within the composition can be between about 10 and about 10¹³ PFU per mL of preparation.

[0052] As noted above, the therapeutically or prophylactically effective amount of the bacteriophage composition can be administered to the subject. The bacteriophage composition comprises unencapsulated phages and/or encapsulated phages, or a combination thereof. For example, and without limitation, the therapeutically or prophylactically effective amount can be administered to a subject in need of treating or preventing the infection or disease caused by APEC. An effective amount of the bacteriophage composition can be administered to the subject prophylactically (e.g., before disease onset) or therapeutically (e.g., concurrently or after disease onset). In certain embodiments, the effective amount can be administered orally to the subject prior to, during, or following APEC exposure, which may lead to infection, in a single or multiple administrations. The effective amount can, for example, include about 10 PFU to about 10¹³ PFU of each phage per ml of composition, in volumes between 0.1 mL to 5 mL per bird per treatment. The total effective amount of the bacteriophage composition can be administered in a single dose or over multiple doses and can, at the practitioner's discretion.

[0053] In certain embodiments, a bacteriophage composition can be administered to a subject at about 10 PFU to about 10¹³ PFU of each phage per ml of composition, in volumes between 0.1 mL to 5 mL per bird per treatment. The bacteriophage composition can be administered at least once, twice, thrice or more times daily. The bacteriophage composition can be administered over a period from about 1 day to about 60 days.

[0054] The subject can have an infection or disease, such as colibacillosis, caused by APEC. The effective amount of the bacteriophage composition can be administered to the subject orally. As used herein, the term “administering” and its formatives generally refer to any and all means of introducing a composition to the subject, including, but not limited to, by oral, topical, intravenous, subcutaneous, intratracheal, intramuscular, and like routes of administration. The composition can also be administered in vivo. In exemplary embodiments, the bacteriophage composition can be administered by oral gavage, such as by using a Monoject Curved Tip Syringe. By way of other examples, the bacteriophage composition can be administered as a capsule or in the form of feed or water.

[0055] In certain embodiments, a bacteriophage composition comprises a prophylactically or therapeutically effective amounts of one or more bacteriophages selected from AHP, AHC, AKA, MIA, MP1, MP2, and any combination of two or more of the foregoing and a pharmaceutically acceptable carrier, excipient, or diluent.

[0056] Effective amounts can range, for example, from about 10 PFU to 10¹³ PFU of each phage per ml of composition, in volumes between 0.1 mL to 5 mL per bird per treatment. The total effective amount of the bacteriophage composition can be administered in single or divided doses and can, at the practitioner's discretion, fall outside of the typical ranges given herein.

[0057] Six bacteriophages were isolated to develop a bacteriophage-based treatment for infection or disease caused by APEC, for example, colibacillosis, in a subject. A suitable subject can be a chicken. The phages were isolated from untreated wastewater samples obtained from a wastewater treatment plants in central Indiana (USA), livestock/poultry waste samples from the Purdue University Animal Sciences Research and Education Center (West Lafayette, IN, USA), area using the methods as described in Wall et al., 2010, Applied and Environmental Microbiology, 76 (1), 48-53, which is hereby specifically incorporated by reference for its teachings regarding same. The individual ability of isolated bacteriophages to lyse ten different APEC serotypes was assessed by conducting spot assays using all ten APEC serotypes. This host-spectrum analysis indicated that the bacteriophages (i.e., MP1, MP2, AHP, AKA, AHC, and MIA) that were isolated, purified, and assessed had a broad host range and some degree of lytic capacity against at least two different APEC serotypes, with four of the phages lysing four or more distinct APEC serotypes. The degree of lysis was measured using a four-point scale. A score of 0 indicated no lysis, 1.0 indicated some lysis, 2.0 indicated moderate lysis, and 3 indicated complete lysis. Considered together, the six phages had lytic activity against 90% (9/10) of the targeted O-serotype APEC strains. All phages lysed APEC serotype O2:H4 to some degree.

[0058] The further lytic activity analyses of six bacteriophages indicated that these phages were highly lytic against their respective APEC hosts. Specifically, when compared to APEC cultures incubated without phages, MP2, and AHP-treated APEC cultures were found to have significantly lower (P<0.05) concentrations of their respective APEC hosts at 1, 2, 3, and 4 hours post-treatment. Significantly lower (P<0.05) concentrations of APEC were observed in host APEC cultures co-incubated with either AKA, AHC, or MIA than in untreated APEC cultures at 2, 3, and 4 hours post-treatment (Error! Reference source not found.). As each bacteriophage was tested with its respective APEC serotype, differences in the length of time it took for each of the phages to cause a significant reduction in the concentration of their APEC host may have been the result of differences in the growth rates of the APEC serotypes or differences in phage adsorption and other growth kinetics. Individual bacteriophage types were co-incubated with their respective APEC hosts at an MOI of 10. The lytic capacity of a combination of AHP, AKA, AHC, MIA, MP1, and MP2 was also assessed. The results of this experiment indicated that APEC cultures treated with these six phages in combination had significantly lower (P<0.05) APEC concentrations at 2, 3, and 4 hours post-treatment in comparison to untreated APEC cultures. The phage combination was co-incubated with APEC at an MOI of 10.

[0059] The genome of each phage was sequenced, and AHP, AKA, AHC, MIA, MP1, and MP2 were further assessed to determine the viability of each phage in different environments. During these assessments, phages were exposed to simulated gastric fluids (SGF; pH 2.5) and to simulated intestinal fluids (SIF; pH 7).

[0060] APEC colonizes the hindgut in poultry, and a successful intervention against APEC must be able to effectively reduce concentrations of APEC within the hindgut. Phage viability was tested by incubating unencapsulated and encapsulated phages in both SGF and SIF. Except in the case of MP1, no significant differences (P>0.05) were observed between the viability of unencapsulated phages exposed to SIF and the viability of unencapsulated phages exposed to a PBS control solution after 1, 2, and 3 hours (FIG. 5). However, phage concentrations were typically significantly lower (P<0.05) in samples of unencapsulated phages exposed to SGF for 5, 15, 30, 60, and 90 minutes than in samples of unencapsulated phages exposed to a PBS control solution for the same time intervals (FIG. 3). Unencapsulated, AKA, MIA, and AHC were not detectable after exposure to SGF for 5 minutes. In contrast, the viability of encapsulated phages exposed to SGF for 15, 30, and, in some cases, 60 minutes was not found to significantly differ from the viability of encapsulated phages exposed to a PBS control solution for the same lengths of time (FIG. 4). The viability of encapsulated phages exposed to SGF for 90 minutes was significantly lower (P<0.05) than that of encapsulated phages exposed to a PBS control solution for 90 minutes, but concentrations of the SGF-exposed encapsulated phages remained above 10⁶ PFU/mL. These results suggest that the viability of unencapsulated phages is typically significantly affected by the intestinal environment and that encapsulated phages were better able to withstand the gastric environment than unencapsulated phages.

[0061] The phages AHP, AKA, AHC, MIA, MP1, and MP2 were encapsulated and exposed to SIF for varying lengths of time in order to measure the concentrations of these phages released into the environment under these conditions. Results indicated that, after exposure to SIF for 1 hour, encapsulated phages had been released into the environment and were present at concentrations above 7.7 log₁₀ PFU/mL (FIG. 6). In most cases, the concentrations of phages in the environment (i.e., phages released from microcapsules) after 2 hours of SIF exposure were significantly higher (P<0.05) than those observed after 1 hour of exposure to SIF. No significant differences were observed between the concentrations of phages in the environment after 2 hours of SIF exposure versus after 3 hours of SIF exposure (FIG. 6).

[0062] The efficacy of phages was tested in vivo in chickens experimentally challenged with APEC. The chickens were divided into four groups: a treatment group in which chickens were neither challenged with APEC nor administered phages, a treatment group in which chickens were challenged with APEC but did not receive phages, a treatment group in which chickens were not challenged with APEC but were administered phages, and a treatment group in which chickens were both challenged with APEC and treated with phages. All phage-treated chickens received a composition described herein. The combination of encapsulated and unencapsulated phages showed greater reductions in bacterial colonization as the unprotected phages can immediately attach to and infect APEC in the lungs and proximal sections of the GIT when encapsulated phages can survive the gastric environment and reach distal areas of the GIT. When used alone, on the other hand, unencapsulated phages may not survive into the lower portions of the gastrointestinal tract, and encapsulated phages may not be able to effectively attach to host bacteria in the upper gastrointestinal tract, thereby limiting the impact of these phages on host bacterial concentrations.

[0063] Concentrations of APEC in the cecal contents and lung tissues of chickens in all treatment groups were measured. At 1 day post-challenge, concentrations of APEC in the cecal contents of challenged, phage-treated chickens were not found to be significantly different than those of challenged, untreated chickens. However, significantly lower (P<0.05) concentrations of APEC were observed in lung samples from challenged, phage-treated versus challenged, untreated chickens at 1 day post-challenge. APEC concentrations in both cecal content and lung samples were significantly lower (P<0.05) in challenged, phage-treated versus challenged, untreated chickens at 2 days post-challenge. At 4 days post-challenge, concentrations of APEC in both the cecal contents and lungs of challenged, phage-treated birds were again significantly lower (P<0.05) than those in the cecal contents and lungs of challenged, untreated birds. The concentrations of APEC were frequently below detectable limits in lung samples from challenged, phage-treated chickens, and, at 4 days post-challenge, APEC was not detected in any of the lung samples taken from challenged, phage-treated chickens. Additionally, APEC was not detected in the lungs of either unchallenged, untreated or unchallenged phage-treated chickens at any sampling point. Cecal samples from unchallenged, phage-treated chickens were also not found to have detectable levels of APEC at any time point. A limited number of cecal samples from unchallenged, untreated chickens had detectable concentrations of APEC at 4 days post-challenge, though no APEC was detected in samples from this treatment group at 1 or 2 days post-challenge. Lung tissues and the surrounding environment are thought to have little impact on phage viability. Unencapsulated phages can act more immediately in the lungs, causing rapid bacterial lysis and more immediate reductions in bacterial concentrations. Additionally, in most cases, APEC was not recovered from the lungs of phage-treated birds, whereas concentrations of APEC in the lungs of untreated birds was 4.81 log₁₀ CFU/g. The phage treatment effectively controlled APEC colonization and replication in the ceca and lungs of APEC-challenged chickens.

[0064] Thus, the phage compositions disclosed herein can successfully control colibacillosis in chickens and have several advantages over traditional antibiotics, including, but not limited to, the control of infections or diseases caused by antibiotic-resistant bacteria.

### EXPERIMENTAL

### Bacterial Serotypes

[0065] Five different O-antigen-based serotypes of Escherichia coli (E. coli), namely O78, O2, O1, O5, and O6, account for 85% of avian colibacillosis infections associated with APEC. Three strains of O78, two strains of O2, two strains of O1, one strain of O5, and one strain of O6 were used to assess the lytic capacity of wild-type phages described below. These ten strains were then stored in 20% (v/v) glycerol at −80° C. until use.

### Bacteriophage Isolation and Purification

[0066] Untreated wastewater from wastewater treatment plants in central Indiana, livestock/poultry waste from the Purdue University Animal Sciences Research and Education Center (West Lafayette, IN USA), and duck excreta, chicken cecal contents, and chicken excreta from commercial processing facilities were used as samples to isolate APEC phages as described in Wall et al., 2010, Applied and Environmental Microbiology, 76 (1), 48-53, which is hereby specifically incorporated by reference for its teachings regarding same.

[0067] Solid waste samples (1 g) were suspended in 10 mL 1×PBS (137 mM NaCl, 2.7 mM KCl, 8 mM Na₂HPO₄, 2 mM KH₂PO₄; pH=7) and homogenized by vortexing. This suspension was centrifuged (2,650×g) for 20 minutes to sediment solids. The supernatant was then filtered through 0.45 μm filters. The filtrate was mixed in equal volumes (1:1) with log-phase cultures of individual APEC strains in 2× LB broth and incubated at 37° C. overnight with shaking. These overnight cultures were centrifuged (2,650×g) for 20 minutes, and the supernatants were filtered through 0.45 μm filters. Phages present in the filtrates of the overnight cultures were detected by standard spot assay. To perform spot assays, a mixture of 67.5 μL of CaCl₂) (1M), 100 μL of an individual APEC strain at log-phase growth, and 4 mL of LB overlay was pour-plated onto an LB agar plate. Once the overlay solidified, 5 μL droplets of each filtrate were applied to the top layer of the plate, allowed to dry, and incubated at 37° C. overnight. The resulting plaques were lifted and transferred to 1 mL of 1×PBS. This phage/PBS solution was serially diluted and then used to perform a plaque assay. Plaques were purified twice more by plaque assay. Phage stocks were then generated by combining the thrice-purified plaques with 100 mL of log-phase growth APEC, incubating overnight at 37° C. with shaking, centrifuging this overnight culture at 2650×g, and filtering the supernatant through 0.45 μm filters. The filtered supernatant was treated with chloroform (10% v/v) to kill any remaining bacteria and stored at −80° C. until further use.

### Phage Characterization:

### A] Lytic Capacity of Individual Phages

[0068] Individual APEC strains (100 μL) were inoculated into 15 mL LB media in separate tubes (two tubes per strain) and incubated at 37° C. in a shaking incubator. Once the bacterial cultures reached an OD₆₀₀ 0.18-0.22, the individual bacteriophage types (MOI=10) were added to one tube from the pair of tubes inoculated with their respective host APEC strain. The other tubes of bacterial culture were left untreated and served as negative controls. Bacterial growth was assessed by measuring absorbance (OD₆₀₀) in all tubes every hour for 4 hours. The experiment was repeated three times.

### B] Lytic Capacity of Phage

[0069] The six APEC strains were individually inoculated into LB broth and incubated at 37° C. until they reached log-phase growth. Phages were added to the log-phase culture of their APEC host at an MOI of 10, and subsequent bacterial concentrations were determined by measuring the absorbance (OD₆₀₀) of the culture at 1, 2, 3, and 4 hours post-phage application. One flask containing only bacterial culture was included as a negative control. Additional flasks containing both bacterial cultures and antibiotics (specifically, gentamycin sulfate, kanamycin sulfate, nalidixic acid, or chloramphenicol) at their respective minimum inhibitory concentrations (National Antibiotic Resistance Monitoring System (NARMS) 2019, antibiotics tested by NARMS) were included as positive controls. These lytic capacity experiments were conducted in triplicate for each of the phage types and their respective host APEC strains.

### C] Host Range Characterization

[0070] The host range of each bacteriophage type was determined by performing spot assays using each of the ten distinct APEC serotypes mentioned above. Spot assays were performed as known in the art (Barrow et al., 1998, Clinical and Diagnostic Laboratory Immunology, 5 (3), 294-298). 100 μL aliquots of log-phase bacterial cultures were combined with 67.5 μL 1M CaCl₂) and 4 mL LB overlay, mixed briefly, and poured over LB agar plates. Once the overlay had solidified, 5 μL aliquots of individual phage types were applied (i.e., spotted) onto the plates, and plates were incubated at 37° C. overnight. Plates were assessed for clearings the following day and the degree of lysis was measured using a four-point scale in which 0 indicated no lysis, 1.0 indicated some lysis, 2.0 indicated moderate lysis, and 3 indicated complete lysis. Spot assays were conducted in triplicate for each phage and APEC strain.

### D] Whole Genome Sequencing

[0071] Phage DNA was extracted using a phenol-chloroform-isoamyl (PCI) method, as well-known in the art (Sambrook and Russell, 2006, CSH Protocols, 2006 (1), 4455) with some modifications (Alvi et al., 2020, Archives of Virology, 165 (6), 1289-1297). Individual phage types (1 mL) were combined with RNase A (100 ug), DNase I (1U), and 1M MgCl₂ (12.5 μL) and incubated at 37° C. for 3 hours. Nucleases were further denatured by incubating the mixture at 75° C. for 20 minutes in a water bath. The solution was then combined with 2.5 μL (20 mg/mL) proteinase K, 50 μL of 10% SDS, and 40 μL of 0.5M EDTA and incubated at 55° C. in a water bath for 1 hour with gentle mixing by inverting tubes every 20 minutes. Each of the lysate and reagent mixtures (1107 μL total per mixture) was divided equally into two microfuge tubes (553.5 μL per tube) and an equal amount (1:1) of PCI (553.5 μL; Invitrogen; Waltham, MA, USA) was added to each tube. The samples were gently mixed by inverting the tubes and were then centrifuged at 13,000×g for 10 minutes. The top layer was carefully transferred to a new microfuge tube. Sodium acetate (3M; 50 μL) and 1 mL of ice-cold 95% (v/v) ethanol were added to these tubes and samples were incubated on ice for 10 minutes and then centrifuged at 13,000×g for 10 minutes. The resulting pellet was washed with 500 μL of 70% (v/v) ethanol by pipetting and centrifuged at 13,000×g for 5 minutes. The supernatant was discarded, and the washing step was repeated. After discarding the supernatant the second time, the samples were air-dried by inversion onto blotting paper. The dried pellet was dissolved in 40 μL of DNase/Rnase-free ultrapure distilled water (Invitrogen), and whole-genome sequencing was performed on an Illumina MiSeq next-generation sequencing system.

### E] Encapsulation of Phages

[0072] Bacteriophages were microencapsulated within sodium alginate microcapsules as well-known in the art with some modifications (Krasaekoopt et al., 2004, International Dairy Journal, 14 (8), 737-743). In short, sodium alginate (4 g) was mixed with 400 mL of a bacteriophage filtrate to make a 1% (w/v) suspension. This suspension was allowed to gel at room temperature for 4 hours and was then processed through a Buchi Encapsulator-B395 set at 200 Hz (frequency) and 1000V (electrode) with an aperture of 0.3 mm. The resulting microcapsules were collected in a beaker containing a hardening solution (100 mM CaCl₂)) with continuous stirring to avoid clumping of microcapsules. Microcapsules were allowed to sit in the 100 mM CaCl₂) solution to harden for 30 minutes and were then washed three times with SM buffer. Washed microcapsules were stored in SM buffer in 50 ml conical tubes at 4° C. until further use. Each of the six phage types was individually microencapsulated in this manner.

### F] Encapsulation Efficiency

[0073] To assess the efficiency of microencapsulation, the concentrations of microencapsulated phages were compared to pre-encapsulation concentrations as well-known in the art (Yongsheng et al., 2008, Applied and Environmental Microbiology, 74 (15), 4799). To determine bacteriophage concentrations in microcapsules, microcapsules (0.5 g) were dried by contact with filter paper and then dissolved in 4.5 mL of dissolving solution (50 mM sodium citrate, 0.2M sodium bicarbonate, and 50 mM Tris-HCl; pH 7.5). Bacteriophage concentrations were then quantified by standard plaque assay as described previously. Encapsulation efficiency (EE %) was calculated as:

EE %=encapsulated phage concentration/pre-encapsulation phage concentration

### Analysis of Phage Stability and Release in Simulated Body Fluids:

### A] Phage Stability in Simulated Gastric Fluid (SGF)

[0074] The stability of bacteriophages in gastric environments was tested by exposing both encapsulated and unencapsulated bacteriophages to simulated gastric fluid (SGF; 0.32% pepsin (w/v) in 0.2% NaCl; pH 2.5) and to 1×PBS (Moghtader et al., 2016). In this experiment, unencapsulated phages (0.5 mL, in concentrations ranging from 1×10⁹ to 4×10⁸ PFU/mL depending on the phage type) were added to 4.5 mL of either SGF or PBS (5 replicates per treatment) and incubated at 41° C. This temperature was chosen as it is a typical internal temperature for chickens. Encapsulated phages (0.5 g, in concentrations ranging from 2×10⁹ to 2×10⁸ PFU/mL depending on the phage type) were also added to 4.5 mL of either SGF or PBS (5 replicates per treatment) and incubated at 41° C. Aliquots (100 μL) were collected from each unencapsulated phage sample after 5, 15, 30, 60, and 90 minutes of exposure to SGF or PBS. These aliquots were serially diluted, and phage concentrations were measured by standard plaque assay. At 15, 30, 60, and 90 minutes post-SGF or PBS exposure, microencapsulated phages were washed with SM buffer to remove residual SGF or PBS and then dissolved in a dissolving solution. Aliquots of the dissolved microcapsules were serially diluted and phage concentrations were measured by standard plaque assay. This experiment was conducted in triplicate for each phage type. Samples containing SGF and unencapsulated bacteriophages were serially diluted without washing and phage concentrations were measured by standard plaque assay as described above. Concentrations of viable phages after exposure to SGF or PBS for a given length of time were then compared.

### B] Phage Stability in Simulated Intestinal Fluid (SIF)

[0075] To assess phage stability in intestinal fluids, 0.5 mL of unencapsulated phages were added to 4.5 mL of simulated intestinal fluid (SIF; 0.1% (w/v) bile salt and 0.4% (w/v) pancreatin in 50 mM KH₂PO₄; pH 7) and incubated at 41° C. As a negative control, 0.5 mL of unencapsulated phages were added to 4.5 mL of 1×PBS and incubated at 41° C. Aliquots (100 μL) were collected from each sample after 1, 2, and 3 hours of exposure to SIF. These aliquots were serially diluted and phage concentrations were measured by standard plaque assay as described above. The experiment was conducted in triplicate for each phage type. Concentrations of viable phages after exposure to SIF or PBS at a given time point were then compared.

C] Phage Release from Microcapsules in SIF

[0076] The extent to which phages were released from microcapsules in the intestinal environment was investigated by incubating encapsulated phages first in SGF and then in SIF. 0.5 g of microencapsulated phages (microcapsules) was added to 4.5 mL SGF in duplicate tube sets and incubated at 41° C. for 1 hour with shaking. SGF was then carefully removed via pipetting and microcapsules were combined with either 4.5 mL of SIF or 4.5 mL 1×PBS and incubated at 41° C. with shaking. Aliquots (100 μL) were collected from each sample at 1, 2, and 3 hours following exposure to SIF. The concentrations of released phages in these aliquots were determined using standard plaque assays with phages' respective host APEC serotypes. The experiment was conducted in triplicate with each phage type.

### Phage Treatment of APEC Challenged Chickens:

### A] Selection of Host Strain and Minimum Inhibitory Concentration (MIC)

[0077] As non-pathogenic E. coli are among the bacteria normally present in chickens' gastrointestinal tracts, potential antibiotic resistance selection markers in challenge APEC strains were identified by conducting antibiograms of each APEC strain in the library of APEC strains using a previously described micro-broth dilution method. 90 μL of Brain Heart Infusion broth was aliquoted into each well of 96-well plates. Antibiotics (specifically, kanamycin, gentamycin, neomycin, nalidixic acid, streptomycin, and ampicillin) were added to wells in order to establish an antibiotic concentration gradient spanning across each antibiotic's minimum inhibitory concentration (MIC) as reported by NARMS. Each APEC strain was incubated until it reached log-phase growth; these APEC cultures were then diluted at a ratio of 1:20 in fresh BHI broth and aliquots (10 μL) of diluted cultures were added to each well (with only one APEC strain used per phage). Plates were incubated overnight at 37° C. Wells containing only bacterial cultures and BHI broth or only BHI broth were included as negative and contamination controls, respectively. Following incubation, the lowest concentration of each antibiotic that prevented visible bacterial growth was recorded as the MIC for that antibiotic. MICs were confirmed for each APEC strain by plating each strain on sorbitol-MacConkey agar supplemented with antibiotics at the determined MICs and incubating plates overnight at 37° C. The challenge APEC strain was then selected by incubating samples from chicken ceca on sorbitol-MacConkey agar supplemented with antibiotics at the determined MICs and incubating these samples overnight at 37° C. Following these trials, the APEC strain O2:H4 was chosen as the challenge strain for future animal studies because of its resistance to streptomycin and gentamycin at 64 ug/mL and 32 ug/mL, respectively. At these levels, streptomycin and gentamycin were found to prohibit the growth of all other bacteria in the cecal samples.

### B] Bacteriophage Composition and Encapsulation

[0078] The bacteriophage composition was prepared by first combining the six bacteriophages in volumes adjusted to ensure a final concentration of 10⁸ PFU/mL per phage. The concentration of the composition was confirmed through standard plaque assay as described above. The phages was then encapsulated using the protocol described above and stored at 4° C. until further use.

### Efficacy of Phage Treatment In Vivo

[0079] Chicks were randomly assigned to one of four separate rooms corresponding to one of four treatments (n=26 birds per treatment): 1) unchallenged birds receiving no phage treatment (negative control); 2) APEC challenged birds receiving no phage treatment (positive control); 3) unchallenged birds receiving a mixture of unencapsulated and encapsulated phages; and 4) APEC challenged birds receiving a mixture of unencapsulated and encapsulated phages. All birds were fed a standard diet without medications and were provided with both food and water ad libitum. On day (d) 4 of the experiment, prior to any phage treatment or APEC challenge, six birds from each treatment group were euthanized by CO₂ and cervical dislocation. Cecal contents and lung tissues were collected and assessed for the presence of naturally occurring antibiotic-resistant E. coli strains, as described below.

[0080] On day 5, birds in treatment groups receiving a bacterial challenge were administered APEC serotype O2:H4 by oral gavage (1 mL at 10⁷ CFU/mL). On days 4, 5, 6 and 7, birds in phage treatment groups were orally administered 500 μL (5×10⁷ PFU/mL) of unencapsulated phages using a Prima-Tech Bottle Mount Vaccinator (Neogen) and 500 mg (5×10⁷ PFU/g) of encapsulated phages using a Monojet Curved Tip Syringe. All phage-treated birds were administered both unencapsulated and encapsulated phages; considering both encapsulated and unencapsulated phages, phages were administered at an MOI of 10.

[0081] On days 6, 7, and 9, 6 birds from each treatment group were euthanized by CO₂ and cervical dislocation. Cecal contents and lung tissues were collected from each euthanized bird. Cecal content samples (0.5 g) were then added to 4.5 mL of Buffered Peptone Water (BPW) and mixed thoroughly by vortexing. The mixed samples were serially diluted and aliquots (100 μL) of each dilution were spread on SMAC agar plates supplemented with streptomycin (64 μg/mL) and gentamycin (32 μg/mL). Plates were incubated overnight at 37° C., and APEC O2:H4 colonies were counted the following day. The efficacy of phage treatment in reducing bacterial concentrations was assessed by comparing concentrations (CFU/mL) of APEC O2:H4 observed in cecal content samples from phage-treated versus untreated birds.

[0082] Lung tissues were homogenized in BPW at a ratio of 1:10 (lung tissue to BPW). Homogenized lung samples were then serially diluted and aliquots (100 μL) of these dilutions were spread on SMAC agar plates supplemented with streptomycin (64 μg/mL) and gentamycin (32 μg/mL). Plates were incubated overnight at 37° C. and APEC O2:H4 colonies were enumerated the following day. The efficacy of phage treatment was assessed by analyzing the differences in the concentrations of APEC O2:H4 observed in lung tissues from phage-treated and untreated birds.

### Analysis

[0083] Statistical analysis was performed with GraphPad Prism. One-way ANOVA with repeated measures was used to determine if, in comparison to a PBS control solution, either individual phage types or the poly-phage treatment significantly reduced the concentration of host bacteria in liquid media at any particular time point during assessments of lytic capacity. One-way ANOVA was also used to assess the effects of SGF and SIF on the viability of unencapsulated and encapsulated phages. One-way ANOVA with Tukey's multiple comparison test was used to determine whether the concentrations of phages released into SIF from microcapsules significantly differed over time. The concentrations of APEC O2:H4 detected in cecal content and lung samples collected from phage-treated and untreated birds at given time points were also compared using one-way ANOVA with Tukey's multiple comparison test. Differences were considered statistically different at P<0.05.

### Results:

### A] Phage Isolation and Host Range Characterization

[0084] Six bacteriophages that were lytic for one or more of the ten APEC strains were isolated from the waste samples tested. All six phages made circular clearings (i.e., plaques) on the bacterial lawn when spotted on LB agar plates overlayed with their respective APEC host strains (Error! Reference source not found.). Through assessments of the lytic spectrum, or host range, of each of these bacteriophages using standard spot assays that employed all ten APEC strains, AHP was found to be highly lytic (degree of lysis=2.7-3.0) against four different APEC strains (three distinct O-serotypes). Phages AKA, MIA, and AHC were each observed to lyse six different APEC strains (five distinct O-serotypes) with varying degrees of lysis (ranging from 1.0 to 3.0), while MP1 and MP2 were each found to lyse two different APEC strains (one O-serotype) with a high degree of lysis (2.7 in both cases, MP1; 3.0 in both cases, MP2). The six isolated phages together exhibited some degree of lytic capacity against nine of the ten APEC strains tested (Error! Reference source not found.).

TABLE 1
Bacteriophages isolated from waste samples and their APEC hosts

| Host | | SEQ ID |
|---|---|---|
| Serotype | Bacteriophage | number |
| E. coli | Escherichia phage vB_Eco_AHP (AHP) | SEQ ID NO: 1 |
| O6:H31 | Escherichia phage vB_Eco_AHC (AHC) | SEQ ID NO: 2 |
| | Escherichia phage vB_Eco_AKA (AKA) | SEQ ID NO: 3 |
| | Escherichia phage vB_Eco_MIA (MIA) | SEQ ID NO: 4 |
| E. coli O2:H4 | Escherichia phage vB_Eco_MP_1 (MP1) | SEQ ID NO: 5 |
| | Escherichia phage vB_Eco_MP_2 (MP2) | SEQ ID NO: 6 |

TABLE 2
Host range analysis of phages AHP, MP1, MP2, AKA,
MIA, and AHC using ten different APEC serotypes

| E. coli | Bacteriophage | | | | | |
|---|---|---|---|---|---|---|
| serotype | AHP | MP1 | MP2 | AKA | MIA | AHC |
| O1:H23 | 3.0 | — | — | 1.0 | 1.0 | 1.0 |
| O78:H51 | — | — | — | 1.0 | 1.0 | 1.0 |
| O78 | — | — | — | 1.3 | 2.0 | 1.7 |
| O2:H6 | 2.7 | 2.7 | 3.0 | 1.7 | 2.3 | 2.0 |
| O6:H31 | 3.0 | — | — | 3.0 | 2.7 | 2.7 |
| O1:H7 | 3.0 | — | — | — | — | — |
| O5 | — | — | — | 1.7 | 1.7 | 1.7 |
| O2:H4 | — | 2.7 | 3.0 | — | — | — |
| O78:H9 | — | — | — | — | — | — |
| O2 | — | — | — | 2.7 | 3.0 | 3.0 |

— indicates no lysis at all, 0.1-1.0 indicates that the phage is semi-lytic, 1.1-2.0 indicates moderate lysis of bacteria, 2.1-3.0 indicates complete lysis of bacteria and formation of a transparent, circular clearing on the bacterial lawn.

### B] Lytic Capacity of Individual Phages and of a Bacteriophage Composition

[0085] The ability of the six isolated bacteriophages to lyse their respective host APEC serotypes in liquid media was investigated by inoculating APEC cultures with the appropriate phage type, incubating the inoculated cultures at 37° C., and measuring absorbance (OD₆₀₀) over time. After 1 hour of incubation, the OD₆₀₀ readings of MP1-treated (0.101), MP2-treated (0.328), and AHP-treated (0.284) APEC cultures were significantly lower (P<0.05) than those of untreated APEC host cultures (untreated MP1 and MP2 host, OD₆₀₀=0.454; untreated AHP host, OD₆₀₀=0.497). The OD₆₀₀ readings of AKA-, MIA-, and AHC-treated cultures did not significantly differ (P>0.05) from those of untreated APEC host cultures after 1 hour of incubation.

[0086] At 2, 3, and 4 hours of incubation, the OD₆₀₀ readings of all phage-treated APEC cultures were significantly lower (P<0.05) than those of untreated APEC host cultures at the same time points. The significantly lower OD₆₀₀ readings observed in all phage-treated APEC cultures at and after 2 hour of incubation indicated that phage treatment resulted in bacterial cell lysis in these cultures (FIG. 1).

[0087] APEC serotype O2:H4 was selected to serve as the host APEC serotype in assessments of the lytic capacity of a phage treatment comprised of all six phages. Antibiotic (specifically, kanamycin, gentamycin, chloramphenicol, and nalidixic acid) treatments were included in these experiments as positive controls. After 2, 3, and 4 hours of incubation, the phage-treated APEC culture (0.131) was significantly lower (P<0.05) than that of the untreated bacterial culture (1.02) at the same time point. These significant differences indicated that phage-induced bacterial lysis occurred in phage-treated APEC cultures. The OD₆₀₀ readings of APEC cultures were treated with chloramphenicol and nalidixic acid, while the OD₆₀₀ readings of cultures treated with gentamycin and kanamycin increased over time (FIG. 2).

### C] Encapsulation Efficiency

[0088] The efficiency of encapsulation was determined by comparing the concentration of phages, where phages are encapsulated, to the concentration of phages where phages are not encapsulated (pre-encapsulation phage concentration). Phage AHP had an encapsulation efficiency of 97.9%, phages MP1 and MP2 had encapsulation efficiencies of 98.9% each, and phage AKA had encapsulation efficiency of 98.8%. Phage MIA had an encapsulation efficiency of 95.5%, and phage AHC had an encapsulation efficiency of 94.4%. Overall encapsulation efficiencies of all six phages ranged from 94.4% to 98.9% (see Table 3).

TABLE 3
Encapsulation efficiency of phages MP1, MP2, AKA,
AHP, MIA, and AHC

| | Pre- | Concentration | |
|---|---|---|---|
| | encapsulation | of | Encap- |
| | phage | phages in | sulation |
| | concentration | microcapsules | efficiency |
| Bacteriophages | (PFU/mL) | (PFU/mL) | (%) |
| AHP | 9.6 ± 0.1 | 9.4 ± 0.1 | 97.9 |
| MP1 | 9.3 ± 0.2 | 9.2 ± 0.2 | 98.9 |
| MP2 | 9.4 ± 0.1 | 9.3 ± 0.2 | 98.9 |
| AKA | 8.6 ± 0.2 | 8.5 ± 0.1 | 98.8 |
| MIA | 8.9 ± 0.1 | 8.5 ± 0.1 | 95.5 |
| AHC | 8.9 ± 0.1 | 8.4 ± 0.2 | 94.4 |

### D] Phages Stability in SGF

[0089] The stability of both unencapsulated and encapsulated phages was tested in SGF (pH 2.2-2.5) containing protease (specifically, pepsin). In testing with unencapsulated phages, however, concentrations of MP1 and MP2 phages in samples exposed to SGF were observed to be significantly lower (P<0.05) than those in samples exposed to a PBS control solution at all time points (5 minutes post-exposure: concentrations of SGF-exposed MP1 and MP2 was 8.71 log₁₀ PFU/mL and 7.72 log₁₀ PFU/mL, respectively, concentrations of PBS-treated MP1 and MP2 was 9.27 log₁₀ PFU/mL and 9.05 log₁₀ PFU/mL, respectively). Concentrations of MP1 and MP2 phages in samples exposed to SGF for 90 min were 3.9 log₁₀ PFU/mL and 4.5 log₁₀ PFU/mL lower, respectively, than concentrations of the same phages in samples exposed to PBS for 90 minutes. No significant differences (P>0.05) in phage concentrations were observed between SGF-exposed and PBS-exposed AHP samples after 5 and 15 minutes of exposure. Phage concentrations in SGF-exposed AHP samples were found to be significantly lower (P<0.05) than those in PBS-exposed AHP samples after 30, 60, and 90 minutes of exposure. After 90 minutes of exposure, AHP concentrations in SGF-exposed samples were 2.35 log₁₀ PFU/mL lower than those in PBS-exposed samples. AKA, MIA, and AHC phages could not be detected after 5 minutes of exposure to SGF, and phage concentrations in SGF-exposed AKA, MIA, and AHC samples were significantly lower (P<0.05) than those in PBS-exposed AKA, MIA, and AHC samples, respectively, at every time point Concentration of the same phages when exposed to PBS remained unchanged (FIG. 3).

[0090] When encapsulated phages were used, in contrast, SGF exposure typically only resulted in significantly lower (P<0.05) phage concentrations in SGF-exposed samples versus PBS-exposed controls after 90 minutes. The concentrations of phages in encapsulated MP1 and MP2 samples exposed to SGF for 60 minutes (MP1: 9.09 log₁₀ PFU/mL; MP2: 9.11 log₁₀ PFU/mL) were not found to be significantly different (P>0.05) than those observed in samples of encapsulated MP1 and MP2 phages exposed to PBS for the same time interval (MP1: 9.23 log₁₀ PFU/mL; MP2: 9.15 log₁₀ PFU/mL). However, after 90 minutes of exposure, phage concentrations in SGF-exposed samples of encapsulated MP1 (8.11 log₁₀ PFU/mL) and of encapsulated MP2 (8.41 log₁₀ PFU/mL) were significantly (P<0.05) lower than those in PBS-exposed samples of encapsulated MP1 (9.19 log₁₀ PFU/mL) and MP2 (9.07 log₁₀ PFU/mL), respectively. Nonetheless, concentrations of both phage types were less than 1.00 log₁₀ PFU/mL lower (MP1: 0.97 log₁₀ PFU/mL lower; MP2: 0.74 log₁₀ PFU/mL lower) in SGF-exposed samples than in PBS-exposed samples after 90 minutes of exposure. By comparison, phage concentrations were 3.9 log₁₀ PFU/mL (MP1) and 4.5 log₁₀ PFU/mL (MP2) lower in SGF-exposed samples than in PBS-exposed controls after 90 minutes of exposure when unencapsulated phages were used. After 60 minutes of exposure, phage concentrations in SGF-exposed samples of encapsulated AHP (9.21 log₁₀ PFU/mL), AKA (8.17 log₁₀ PFU/mL), MIA (8.14 log₁₀ PFU/mL), and AHC (8.13 log₁₀ PFU/mL) were not found to be significantly different (P>0.05) than those observed in samples exposed to PBS (AHP: 9.23 log₁₀ PFU/mL; AKA: 8.27 log₁₀ PFU/mL; MIA: 8.27 log₁₀ PFU/mL; AHC: 8.31 log₁₀ PFU/mL). However, phage concentrations in SGF-exposed samples of encapsulated AHP (8.12 log₁₀ PFU/mL), AKA (7.3 log₁₀ PFU/mL), MIA (7.34 log₁₀ PFU/mL), and AHC (7.15 log₁₀ PFU/mL) were significantly lower (P<0.05) than those in PBS-exposed samples of encapsulated AHP (9.19 log₁₀ PFU/mL), AKA (8.22 log₁₀ PFU/mL), MIA (8.27 log₁₀ PFU/mL), and AHC (8.23 log₁₀ PFU/mL) after 90 minutes of exposure (FIG. 4).

### E] Phages Stability in SIF

[0091] The stability of unencapsulated phages in SIF was determined by incubating unencapsulated phages with either SIF or 1×PBS SIF and 1×PBS (control) for 1, 2, and 3 hours. Except in the case of MP1, no significant differences in phage concentrations were observed when unencapsulated phages were incubated with SIF versus without SIF at any time point. Concentrations of MP1 in SIF-exposed samples were significantly lower (P<0.05) than concentrations of MP1 in PBS-exposed samples at all sampling points. (Error! Reference source not found.).

F] Phage Release from Microcapsules in SIF

[0092] The release of phages from microcapsules during exposure to SIF following SGF exposure was measured by incubating phage microcapsules in SGF for 1 hour and then incubating them in SIF for 3 hours. The concentration of phages released into the solution was measured after 1, 2 and 3 hours of incubation in SIF. After 1 hour of incubation in SIF, the concentrations of released phages were 9.14 log₁₀ PFU/mL (AHP), 8.94 log₁₀ PFU/mL (MP1), 8.88 log₁₀ PFU/mL (MP2), 7.99 log₁₀ PFU/mL (AKA), 8.05 log₁₀ PFU/mL (MIA) and 7.99 log₁₀ PFU/mL (AHC), suggesting that 97.4% (AHP), 96.5% (MP1), 95.4% (MP2), 94.4% (AKA), 94.7% (MIA) and 95.8% (AHC) of phages were released from their microcapsules after being incubated in SIF for 1 hour following 1 hour of exposure to SGF. The concentration of phages released into the solution were significantly higher (P<0.05) after 2 hours of incubation in SIF than after 1 hour of incubation in SIF in most cases. No significant difference (P>0.05) was observed between the concentration of released phages after 2 hours of incubation in SIF and after 3 hours of incubation in SIF for any phage type. After 3 hours of incubation in SIF, between 97.4% and 99.6% of phages were released from the microcapsules into the SIF solution across all phage types (Error! Reference source not found.).

### G] Efficacy of Phage Treatment In Vivo

[0093] The efficacy of phage treatment in vivo was assessed by treating APEC-challenged chickens with a mixture of encapsulated and unencapsulated phages and subsequently enumerating APEC concentrations in ceca and lungs. Importantly, APEC was not detected in either cecal content or lung samples collected from birds that were euthanized prior to the APEC challenge, indicating that the birds used in the study were APEC-free prior to the challenge. There were no significant differences in APEC concentrations in the cecal contents of challenged, phage-treated (5.02 log₁₀ CFU/g) versus challenged, untreated (5.05 log₁₀ CFU/g) chickens were observed at 1 d post-challenge. Conversely, concentrations of APEC in the lungs of challenged, phage-treated chickens (0.69 log₁₀ CFU/g) were significantly (P<0.05) lower than those in the lungs of challenged, untreated chickens (2.39 log₁₀ CFU/g). At 1 day post-challenge, APEC was detected in the lungs of 2 out of 6 chickens in the challenged, phage-treated group and 4 out of 6 chickens in the challenged, untreated group. At this time point, APEC was not detected either in the cecal contents, or lung samples from chickens in the unchallenged, untreated, and the unchallenged, phage-treated groups.

[0094] At 2 days post-challenge, concentrations of APEC were significantly lower (P<0.05) in the cecal contents of challenged, phage-treated chickens (4.62 log₁₀ CFU/g) than in the cecal contents challenged, untreated chickens (5.33 log₁₀ CFU/g). Similarly, concentrations of APEC in the lungs of challenged, phage-treated chickens (0.67 log₁₀ CFU/g) were significantly lower than those in the lungs of challenged, untreated chickens (3.15 log₁₀ CFU/g) at 2 days post-challenge. APEC was detected in the lungs of 2 out of 6 chickens in the challenged, phage-treated group and 5 out of 6 chickens in the challenged, untreated group at this time point. APEC was not detected in either the cecal contents, or lungs of chickens in the unchallenged untreated and the unchallenged phage-treated groups at 2 days post-challenge.

[0095] At 4 days post-challenge, concentrations of APEC were significantly lower (P<0.05) in the cecal contents of challenged, phage-treated chickens (2.79 log₁₀ CFU/g) than in the cecal contents of challenged, untreated chickens (6.1810 log CFU/g). Concentrations of APEC in the lungs of challenged, phage-treated chickens (0.00 log₁₀ CFU/g) were also significantly lower (P<0.05) than those in the lungs of challenged, un-treated chickens (4.81 log₁₀ CFU/g). In fact, concentrations of APEC were below the detection limits in all lung samples from challenged, phage-treated chickens at 4 days post-challenge. At this time point, APEC was not detected in the cecal contents of unchallenged, phage-treated chickens but was, detected (2.0 log₁₀ CFU/g) in the cecal contents of one chicken in the unchallenged untreated group. APEC was not detected in lung samples from either unchallenged, phage-treated or unchallenged, untreated birds at 4 days post-challenge (Table 4).

TABLE 4
Concentrations of E. coli recovered from cecal contents and lung samples of chickens in all
treatment groups

| | E. coli concentration (log₁₀ CFU/g) | | | | | |
|---|---|---|---|---|---|---|
| | 1 day post-challenge | | 2 days post-challenge | | 3 days post-challenge | |
| Treatment | Cecal | | Cecal | | Cecal | |
| groups | contents | Lungs | contents | Lungs | contents | Lungs |
| 1 | 0.0 ± 0.0 | 0.0 ± 0.0 | 0.0 ± 0.0 | 0.0 ± 0.0 | 0.2 ± 0.7 | 0.0 ± 0.0 |
| 2 | 5.0 ± 0.5 | 2.4 ± 1.8 | 5.3 ± 0.2 | 3.1 ± 1.5 | 6.1 ± 0.3 | 4.8 ± 0.3 |
| 3 | 0.0 ± 0.0 | 0.0 ± 0.0 | 0.0 ± 0.0 | 0.0 ± 0.0 | 0.0 ± 0.0 | 0.0 ± 0.0 |
| 4 | 5.0 ± 0.3 | 0.7 ± 1.0* | 4.6 ± 0.3* | 0.7 ± 1.3* | 2.8 ± 2.1* | 0.0 ± 0.0* |

Treatment groups were as follows: 1) unchallenged birds receiving no phage treatment (−ve control); 2) APEC challenged birds receiving no phage treatment (+ve control); 3) unchallenged birds receiving a mixture of unencapsulated and encapsulated phages; and 4) APEC challenged birds receiving a mixture of unencapsulated and encapsulated phages.
Asterisks indicate a significant difference at P < 0.05. Statistical comparisons are within the column.

[0096] As used herein, the following terms and phrases shall have the meanings set forth below. Unless defined otherwise, all technical and scientific terms used herein have the same meaning as commonly understood to one of ordinary skill in the art.

[0097] The term “about” can allow for a degree of variability in a value or range, for example, within 10%, within 5%, or within 1% of a stated value or of a stated limit of a range.

[0098] The terms “a,” “an,” or “the” are used to include one or more than one unless the context clearly dictates otherwise. The term “or” is used to refer to a nonexclusive “or” unless otherwise indicated. In addition, the phraseology or terminology employed herein, and not otherwise defined, is for the purpose of description only and not of limitation. Any use of section headings is intended to aid reading of the document and is not to be interpreted as limiting. Further, information that is relevant to a section heading may occur within or outside of that particular section. The terms “including” and “having” are defined as comprising (i.e., open language).

[0099] It is intended that the scope of the present compositions and methods be defined by the following claims. However, it must be understood that this disclosure may be practiced otherwise than is specifically explained and illustrated without departing from its spirit or scope. It should be understood by those skilled in the art that various alternatives to the embodiments described herein may be employed in practicing the claims without departing from the spirit and scope as defined in the following claims.

We claim:

1. A bacteriophage composition for preventing or treating an infection or a disease caused by Avian Pathogenic E. coli (APEC) comprising an effective amount of at least one phage selected from vB_Eco_AHP (AHP), vB_Eco_AHC (AHC), vB_Eco_AKA (AKA), vB_Eco_MIA (MIA), vB_Eco_MP1 (MP1), and vB_Eco_MP2 (MP2), wherein at least one phage is optionally encapsulated.

2. The bacteriophage composition of claim 1, which comprises encapsulated and unencapsulated phages in a ratio of about 1:1.

3. The bacteriophage composition of claim 1, which comprises phages AHP, AHC, AKA, MIA, MP1, and MP2.

4. The bacteriophage composition of claim 1, wherein the encapsulated phages are encapsulated with a natural polymer.

5. The bacteriophage composition of claim 4, wherein the natural polymer is sodium alginate, chitosan, gum, gelatin, collagen, or a combination of two or more thereof.

6. The bacteriophage composition of claim 4, wherein the natural polymer is sodium alginate.

7. A bacteriophage composition for preventing or treating an infection or a disease caused by Avian Pathogenic E. coli (APEC) comprising an effective amount of at least one isolated phage selected from vB_Eco_AHP (AHP) having a genome comprising a nucleotide sequence of SEQ ID NO: 1, vB_Eco_AHC (AHC) having a genome comprising a nucleotide sequence of SEQ ID NO: 2, vB_Eco_AKA (AKA) having a genome comprising a nucleotide sequence of SEQ ID NO: 3, vB_Eco_MIA (MIA) having a genome comprising a nucleotide sequence of SEQ ID NO: 4, vB_Eco_MP1 (MP1) having a genome comprising a nucleotide sequence of SEQ ID NO: 5, and vB_Eco_MP2 (MP2) having a genome comprising a nucleotide sequence of SEQ ID NO: 6, wherein at least one phage is optionally encapsulated.

8. The bacteriophage composition of claim 7, which comprises phages AHP, AHC, AKA, MIA, MP1, and MP2 comprising the nucleotide sequence of SEQ ID Nos: 1 to 6, respectively.

9. The bacteriophage composition of claim 7, wherein the encapsulated phages are encapsulated with a natural polymer selected from sodium alginate, chitosan, gum, gelatin, collagen, and a combination of two or more thereof.

10. The bacteriophage composition of claim 9, wherein the natural polymer is sodium alginate.

11. A method for preventing or treating an infection or a disease caused by APEC comprising administering to a subject a prophylactically or therapeutically effective amount of a bacteriophage composition comprising at least one phage selected from vB_Eco_AHP (AHP), vB_Eco_AHC (AHC), vB_Eco_AKA (AKA), vB_Eco_MIA (MIA), vB_Eco_MP1 (MP1), and vB_Eco_MP2 (MP2), wherein at least one phage is optionally encapsulated.

12. The method of claim 11, which comprises encapsulated and unencapsulated phages in a ratio of about 1:1.

13. The method of claim 11, which comprises phages AHP, AHC, AKA, MIA, MP1, and MP2.

14. The method of claim 11, wherein the encapsulated phages are encapsulated with a natural polymer selected from sodium alginate, chitosan, gum, gelatin, collagen, and a combination of two or more thereof.

15. The method of claim 14, wherein the natural polymer is sodium alginate.

16. The method of claim 11, wherein the subject is poultry.

17. The method of claim 11, wherein the prophylactically or therapeutically effective amount is from about 10 PFU to about 10¹³ PFU of each phage per ml of composition, in volumes between 0.1 mL to 5 mL per bird per treatment.

18. The method of claim 17, wherein the prophylactically or therapeutically effective amount is administered orally, topically, or subcutaneously to the subject.

19. The method of claim 18, wherein the prophylactically or therapeutically effective amount is administered in a suspension, feed, water, a spray, or an injection to the subject.

20. The method of claim 17, wherein the prophylactically or therapeutically effective amount is administered to the subject over a period of time ranging from about 1 to about 60 days.

The application's sequence listing, which the Patent Office published only in electronic form, follows.

SEQUENCE LISTING (6 sequences)

SEQ ID NO: 1 - DNA, 167455 bp, unidentified
  source 1..167455: mol_type = genomic DNA; note = Found in a bacteriophage isolated from wastewater
gcaatcgcatcatttgatcgccattatccagaagaaggatcagccgcacaaggatttttagaaatatttgaaggtggtttatacacgagaactcagcgttatactacccgcatgggtatggtttatactcgttgtctcgctgctgcatgggatgctagtgcacctaagtgggaggaatggaagcaggttggtcatggcacaccagcgactttctatgatggagatctgaatgattttaaaactcccgggttatataatattttaggcactgatgccgttattaactgtcctacaggtgaaggtttgccgactgttattgttggtttgctggaagttaaacagcgtgcttctggtggtgctattttccaaaaatttactactgccggaacaggcgcaactactcgcggacgtatttttgagcgtgcatatactggtggtgcgtggggtgcatggaacgaagtatatacatcttactctctgccaattactttgggtatgggtggtattaaagctcaattagcggagttagattggcaaacctttgattttgttcctggtagtatgtttagcgttcctttgaacaaaataaagaacatgccagcaaatatggattgggggacgattgacggaaacttggttatgttttccgttggtcctagcgaacacactggcacagggcgtactgttcaggtttggcgcggtactgtatcccagacaaactaccgttatttcgttgttcgtatcgctggtaatccaggaagtaggactaatacttgtcgccgtgttgttcttgaagacggatcacatacttggactgctcaacaaaactttaggggattgctgaatatcactgctgctgttaatcttggtgctaatcagaaaatttcacttgctccaggagcatatattcaagcccctgctagcggttctggttctaatacttacgcaaatcagaatactaccattgcgccattatatcaggctattgacgattcaaataaaaaccagtttgcgccaattgttaaacagaaaaatactgtaagtaatatcacctttgccactggtatggctataggtacatccgaatataagatcattgctcagggtgatttatccgctgatggaatagcagatgggttaaaacagtggactttcatgccgtcaggttattttaaatctccagggcgtgtatatgtcggtgatgcgttccttaatacagatggtaatattgccggttcaatctggaagaaatataacaatgcgacaaatttagatgctgccttgaatactcgcgtaggtaaaggcggtgatacgatgactggcaaattaatcgttagaagaggctctgacgctattaacattgctgccgatgaaaatgattcttgctatttacttggaacatcgggtggagcgaattcatggtacatcggtaaaggaggagcagatgacactgcttcattttataatttcaaaactaccgcaggaattactcttaatagtgttggtgatattgattttaacgtcaaaaatcaagctactgcagcttcattaaatttttatcgtttatatttaaatggaagacaatggacagctacacaaggtcacggctataataatcaatggcaaacagaagccccattcttcgttgactttggtgaatctgttccgaaagatagttatatgcctataattaaaggaagaagccaaatcattaacgaaggatatgccacaaaggcagattttggtattattcgattgggtggaaatgctacttggggaaatgcagtaattcgtgttggttctgcggaaagcggagatagcagccatcctaatgcaatatttgtgtttcaggctaatggcgattttaaagctccggctggccttcgtgctggtgttaacttgggcgtcggcacaattccagtatggggtggagcatctatcgccatcggggatgatgataccggtttagttcatggcggcgatggtcgaattaatatgtatgctaacgcgcagcatatagcatcatggggcacgatgtatcaatctcatccaggcctttgggattcaaatggagctttttggacagaagttggcaaagcaattatttctcatggccatttagttcaggcgaatgacagctattcaacgtatgtccgcgatgtttatgtccgctctgatattcgtgttaaaaaggacctagttaaatttgaaaatgcttctgagaagctttcaaaaattaatggttacacttatatgcagaagcgaggcctagatgaagaaggtaatcagaaatgggaaccaaacgctgggttaattgctcaagaagttcaagctattttacctgaattggttgaaggcgatcaggatagtgaagctttacttcgtttgaactataacggtgtaattggtttaaatacagctgcaatcaatgagcatactgcagaaattgcagaacttaagtcagagattgaagagcttaaaaaattagttaaatcattgttaaaataaaatgaggggcttcggccccttggaggtttatatggcagttgaaggaccgtgggtaggatggtctgcgagggtacaaactggagacccttggatgggtggtgccgcgcagagattgagaatgggaattccgttttggatgagtaatatgataggtcgatctgttgaagtaattcacacccttggagcagaccataacttcaatggtcaatggttccgagatagatgttttgaggcaggtagtgcacctatagtgtttaatattacaggtgatttagtatcatattctaaagatgttcctttattcttcatgtacggagatacaccaaatgaatatgttcagttaaatatacatggcgtaacgatgtatggtcgtggaggtaatggtggtagcaatagtcctggctcagctgggggtcattgtattcaaaacgatattggtgggagactaagaattaataatggcggagctattgcaggcggcggcggtggcggtggcggcggatattattctcctttttcacaaatgagattgacctttggcggcggtggcggtcgtccttttggtgcgccaggcggatctattgatatgcaatcaggcgcgactggtggtactatttctgcacctggctcaggatccgtgaatggtatctataatggcggaaacggtggtgaagtaggttccgcgggaggtagatgcaatattcgcggtcaaggatctgaatatgatggcggtgctgctggttatgctgtcatagggtccgctccaacatggcaaaatgttggagcaatatatggtccaagagtataatgtgaataaatacccttaaaaggagggtctatggcagcacctagaatatcattttcgccctctgatattctatttggtgttctagatcgcttgttcaaagataatgctaccgggaaagttcttgcttcccgggtagctgtcgtaattcttttgtttataatggcgattgtttggtataggggagatagtttctttgagtactataagcaatcaaagtatgaaacatacagtgaaattattgaaaaggaaagaaatgcacgctttgaatctgtcgccctggaacaactccagatagttcatatatcatctgaggcagactttagtgcggtgtattctttccgccctaaaaacttaaactattttgttgatattatagcatacgaaggaaaattaccttcaacaataagcgaaaaatcacttggaggatatcctgttgataaaactatggatgaatatgcagttcatttaaatggacgtcattattattccaactcaaaatttgcttttttaccaactaaaaagcctactcccgaaataaactacatgtacagttgtccatattttaatttggataatatctatgctggaacaataactatgtactggtatagaaatgatcatataagtaatgaccgccttgaatcaatatgtgctcaggcggccagaatattaggaagggctaaataattatttgtttgtatacatctctagatatcgatatacaccctcaaaaccctcgttgaattcgtcgatgagggttttcttatcttcttgggttaattcagaaacaattttacggaatgaattctgatttaactttctaccttcatgcgttactccaatctcattcagaaatgcaataaaattagcacgattctcaacaatatcttctctggaaaatttaatcaaaatagacgcaacagtaataatttcacgaactgtatcaatatttttattcattaactataccactcaattagttgactttgttataatatcatcagacgtttgttttgtaaactggtctgtgttattttcttgaaaaattttttctacgaattccttgaacgactcacgttcctgagctacattatgctcgattactttttcaagattatgactcattcgaaataatcttcaatttcataatcatggacataaatcattatagtttttaatacatcatcaatactttttcctggagctggaattacgtaaaaatatcctgcttttgagaggtctttataagttccaatcaagaaatcattattctcgagatgtagttcttcaactaattcattaacaattgagtggtataaatttggtagaaacttatatagcttttctagaatatcaattttgattgtgtattgaaccacagactgagaatcaataatcatagaccttccccttatgtttctgtttgcgattagattctttaaacgctttcttcttatccttatgaacagaagctttattaaaattatgttttgcgactaaattgttcatagtgctgaattacctctcttaaacatttgcatgtgaatgaaaactttttagctacaccgcattcaaatatatgttctcttaaatcacgtgtatcagtatatcccatctcaacaataaaatgccttattagatttttatctttatcattgagagaattaaaataatcagattttgaattaatttccctggccaaattgaatcaccttcagttgacgttttaattcttttatcatttcttcgttcatcgcaatataaagatcgcgtaaagcaggttttaacattccatttactggagaactaaatggacatacataatcttttcctacgagctttttggtgaattccatatcacagaactgaaatgccggttcattggcataaattccccaattagttgacatcattttattggcatattccaacgcctggatttgattcttaattccatcaatttgaaactttttaatattcattagtaaaggtcctcagagtaaagttctttttcactaccaccgcgttcaatacgtacttgtccggcgtaagttgcaataatcattgcttcttcacgtgtccagtaattgctatactgatcaataaacccttggtcatcatcacaaacttgctgagtaactaattggggtttaactacatctaaaacttctgccatatctttagaataatgacgagcacctggaataacaagagttcgtccatcttttaatttaaaacggttggcggcacaaacaattcgtcgttgatacttttggttttcatcccagtatgcggtctgccaacagatttcaggaacttcttttagaatatcttcttctgtgcatttataaccatgcgctttaaatttttcaacaagactttctggagtttcacgacataaaggaacattcagcatttttaaacgattaataaatgggttcatttaaaccatcctttaatacgttgccataaagttttctgttgagctttgttaacaccaattgaacgaataactggttgagattcctgaaattctttataatcagcaaggtaaatttcgtaagctgcatccgtaaatgaacttatcgctgccataaaattattgcgaatacctactggagcatctttactttcacgaataatcatgtatttaccagtcttaatctttacgatagttccaagataagctccatggtaccagatgtcccaaccctcttgagtaggttctacacaacgacgaagttcattgacaatttctaacttgttcattatttattcctcacagttcagatgctacagtgattacagcttcaatgttttctgccgagcgtttaatgtcaagatacacattaccgtttttagcgattttacatgacattccgatatcagtaaatttctgaatatgatgttccatcattttgtatccaaaaattcgcatatttccattattgttaatttcaaaattacgaattccgtgagtgcgtttttctaaaatggcaagataattactacgataagtttcaacctttttaagaacaaatccattttcatctaaaagttttaacatgaggtctttatcttcttccatatcagaagtaatctcacgagctttacgagttgctcgttttttcagtagttccggagcattttcctgcgcgtataaagttgctgcgtttgaaataatatcttgagcttcacctgtaatgattaatccatcaccagatttctccaccaggccttttttaatcaataccccaatattactattaactactgcgttacctaaatctggatgcacctcacgaacttctgcagctgtaatgaaatctttcttagcaatggtaattaaaatcgcagcagttttttcattcagaacatcgttagaagctttgatgatgtaagttactttagacattttaatctccgtttcagttcatttatttgataggtctatagtatcatgtttaaagcagaagtaaacacttttttgcactctttttcaagagctctaataaagtacttacttaatgttcagattacgaacttcgatttcgtcttcatgggcaaaatcaaactgtttgaattctgtgtcacctttaaatttaaaaatcattgtgaagaaagtcagaacaccaggtttttcttcacgaactccacagatatcatattcaataccatctacaaccagtttgttagcagtcagagcatttttagctttaacgatttcgttttcgattttaaatttcattttttgtatctccgggttgtttgtttcagttcatttatttgatagttgtatagtaccacagtatgctttggttgtaaaccgttttgtgaaaaaatttttgaaataaaaaagggagagcctcggctctccctaaaattactgcatgactgtgataactgtcatgataacacgttgaattccgaacgcaagaagacctcctgctacggcaggaacaacacctaaacccgccagtaaaatgccaccagatactaatgcagcgcttgtgataccaatgaatggactcatttgatttcctctaaatctttggtgtattctgtaactacatcagtagttttccaatattcgttttcttcttttttggctttagcttcttcagcaagtttctttgcttcgtcggaagtcatatgaaaaatgttcattccaactagtttatcaacataagaagaatacatatcaattttagaaagttcttcggttagttctttgcgagttttaccttgtacaacaatttcacctgaaattactttcttaatgaaatgtgccttggcaaaagctaaacgaaatgctgattcagtttctttgattttgttatcaattcgtttttggacataagttttacgaacttcaacgaagtctttgattaaatcaactacattatcgtaaacttgcagctttcctttctcattaatgacggtaatattctgagaacgacgctcaatcaacccgaagtctttcataatttttgcatggcgttcttcttcgttatcgctcaaagagtattctttgcggaatttaactttgaagccaaagccatgctcaccacaagcatcatcccatgtaatgaagcctttatcttcaagtgggtctaagattttactcacataagtttcacgatcatacttatatggaatctcagtgatatgcatttgagttcgtgaagtaaacttgtatgttccacgaatttcatattgcccatcaatttcaacgacttcaccacgaaattctgggaattctaccttcggtttagttactttctttccttgaagagcttgcagtacagctttcttgatagaagaaacactatgaggaagaatgtaagttgcataaccagttgcaataccggaaacgccattaagaagaacagtaggaataacaggcaaatagaaagcaggcggaatgtgttctttatcttgatgtactggagcatattcagtatctttatatacgttatagaaatttttacttacacgagcaaaaatataacgacttgctgctgccttttggacagtacgagaaccaaagtttccttgaccgtctaacagaggaaagttattattccaagtgttagccatcaaagcacctgcgtcttgcgcagagttttcaccatgatgatatccaaggtccgctacaccgcctgcgatagaagcgagtttgtgaaacttatctttatttcctcgtgccaaatcaagagctcgagcaataacaaatcgttgaactggcttaaatccgtcaatcatatttggaatggcacgattttcaaccgtgtacatagcataagccaatgcttcattatcaatgatactttttaaatcacgattattcagttgcataaatttaccatactagtgaatgtagtgccataataacatcagaaatgaaaagcacgacttgaattaatccgaacattattccgtaatataatgctatcaataaaataacaagggctaatgaatagcccaagattttcttaatcattagtagataacaacacaaatgttaaatatgcacacataccctgagctaaagcttgcgaaaacacactgctggcatcaatacagatagttaaaacacatgctactatccaacaaataaatgaaataactcctaataattttgcgatattcatattttcctcactggcgtccgaagacgcctttagttttaagattattacgatagaactgcatcacgtgttcgttgtggaaattactcattaatatgcctgcaaaacgaatttaaaattatcagccaacatacggttcatttcttcaagtgtttgatactcagaatgatgattacgagtaaacgctaaagctaactgtccttttccaaatcccgtcgtcagaggtttcatcttagaagcaggcagataaaatactgcgtatggaacattgttatttgcaatagtacgtgcaagctgagaccgacgttgacgaatatgacttagaactgcactgaatccttgcttagaacgctgattacctacataaaatcgtgcagacacgcatggattactaaatggacgaccatctaatttactcactaaaaagtaaaatccaggtttagataaaaagtctttatgcggagttcccaaaaaccattcaccgttcttgattgtaccaataacggtagcgcccgcattattcagatcagtagcagtcatatatttcatattaatttcctctaaattattttctactccaaggccgcatgaatacacgcggccattaaattaatcgtcgcagtcgacgctcaattcccaaaactcttttacggtataagtttcagtatcattttcaatacagaaacgttcattactgttatttgctaaagtagcattaactgtcggtttctcgctagtgctcttaagaggtgaaatacgaattaactgattaccattatctaaacaaaaaatttcaccaacttttacatctttaaagattttcataattcacctcaaggagtataaaatccaaacgcagttgttgaccatcccatccaatatgggaaatttgcgccaatgtaaaacataagaatataaaaccaaccgctcagcaaattcatcattttacaccattccaaattgtttcaaccacggattttaaaccattttgatgaatgtccattccaactaccgccatcaaatagattccaactacaactgaacctaaggcaaaaatcagcatgaaaatgaataaagccggaaaaatattatcgaaaaaccattcaataaatgtaaaagcactgcgtttacgcttcatattttcctcacataaatccaaagtaagcgtttaatacatcaatcattaaaacgattgggaatatactcaaaactattagtattataactacattccatatagctttaacaatctttttcattttctgttcctccgtagttgatagggtaatagtaccacggaagaacagtcttgtaaacaacttttttaaaaatattcgtaataaatgtgaataccaatcactactgccgaaacttgtgcaacccaccacgcacaagcaataagtacagaattaaaaattttcataataacctcatcacaaaagtaaatgttaaacaaattactggaatactaattaaccaaacaaaacaccaccatagtgaactcatagttcaatctcagcgattttcatttcattactgttaatagccgctttaagactatctgaaagaattacattccagtggtcattcatatgaccattaactaagcgtgtaatttcttcaggagttgaaaaataaggctgatcggactcccaatgcgataatcctaagcgagtataaatcatgccttcatcatcgctagaatattcaactgacacaaactcatcagttattttatgcttagcataataaaatttaaatttcattttactctccaaatccgtatcagttgatagttgtatagtaccacggtccttgtggtatgtaaaccgttttgtgaaaatttttaaatggaaagataccatccgttgtagttgctttttcttacaaccttacgaaggtcttctctatcaccgatgaacttcggagtgtactggatgacacctgggtgaatttctttagtgttgaatataattatacagtccgcgacttgatgatttagaatgggccctagatttattccagaaccatatggatactctccgctgcatcctgttgttaccgaaatccaacgtgagtcagtttgatgtgtcttaacttctacacggagcccacagtattttggatgtgctaaaacatcccatgcatacgtgtacggatcatcgacatcttcttgacctttgttaacatatccgcttagccaatctgccacaaaaaactctgcgtacacagcgatacggcatctttcgataacttctgccttatcctgatttgggttttgttttaaagagtatcttgcagtatcaacaattttgaccttcatttcactagtcaagtcactgttcgatagggtaaatgtcggaatctgaaatagtctctgtaaccccggattcgttttctgcatttaaactttccttttatgtctgaatcactggtattcatataataaatcataatttctcttaaaacaaaagggccgaagcccttattttatttgaattgtgcaattcttttctctagacattcagcataagatttcattgagataaactgcgaaagtaacagttcttgctcaactgtattaactgttagaaactttgcgctttctaaaaatttgctcagtgcattaattttgagcattaattgatcgtattcttcttttactcgtgcttgataacctaacataattttcctcagttaagggccgaagcccttatttaaattgttcagtaacgtcttcaactacttcgtattggcaggtacgcattttagcatcgttgtaatcaatcggaattgatactacatcacgcggatgtactttaacttttacaactcggctagttgaactgccaaagtgacgaatataagatttagaacacacatgcagaccgcgagaacaagtttgtgtatcatcgtcattcacacgagtacgtggcattttaactactttaccagggctgttatcaaaagtatttgaatgacagtcaaagtaattgctgcgaactactttccaagcatagaagtaaccgtcttctgtaatttcaatatcgtttgctaccaagaaatcaaagagtcgagataccgctttttggcttgggttttccaacagattttccaagaacggaaaatagaattcaaagttttcgcctttttccatcgagtcaagaatacgatcaaccaaaccagatcgcaattcaatattttgatagaacaagcttccaccttcaattcgaacatcgccggaaatatatttttcaacagcgcgacgaacattaattttttgtgccgcttcttccaacttatccgctacaagcagattaagaatttcctggaagtttgaatgagtattaggagttgcgttataagttacaccgtcaacagtaattgaaatgaattttttagatgcattccaaataatgtcagatttagcaactggagcaataactacatcgctattaactttaactgtaatatcaccgctaatagtaactttagagcgtttagcttcttcagcatttttcaaaacacgacggattgtgtcaaccgatacaccttgccaatcagccaattcctgttgggtgtaattaccacttgaatacagcttaacaatttcagcttgttcgtttttggtcaggcatttaatattgtacataattttccttattaggccgcaagggccttcatagttttagcgatttgagaaacttcatcatcacttaaagagttgcgatatccgatgaagtcggaaacaatacggaatttcttggtaaactcagcaaccattttatcactgttttttgaagcattatttgataatacatcaaaaagattagttactgtccagatatcatgaccgatggtatcttttccaccgttgaaatatacaccacgcaatgaactaactatattagcgagtcgtgtatattcttcagaaacttcatctgtactgaagtacttcatcataaaatctagttcaggatacttgataattttatcaatatatcgttgagctgaacttgaataacctacgtacttatcataatctacatcatcaaaagcatctacatataaatcacgcagagtttcaaaaatacattggcactgaccgagttcttttacctttttctgcaaaagcggacgaataacataaaactcattaatgccaataagattagccatacgaatcaaaatattcatagatggatgacaaagagatgtagtaccatccatagagaaaatatcagaacgatgcatatacgctacatacccagtaatttcatctgcttctgatgtgagcgtaaataattcctctttttcccagcgcccgtctttaatttcaaacttaaatgctgtagcagctttaggacgaggagctttacttttaactacctttggaatatagcttttaactaaagcttcaatttctgacaaataatgaatgttaacttcatcactttcaaacatcgccataatatcaggaagcaaatcaatctgcgattctacttctggattaataaacagaaggcgttcgttgtgatgaatattcaaagtgttattaaattcactatcatctaacgcatgtgctaatccacggacaatattaacacgatttttaatattatcaataacgatattaatttttgttgcattaataccaaacagacgataacttgatgcaacggctgaagtttcatgactttgcttaatgcgcttcagtcgagggtcaagatttacttcatacacaactcctgcattgcataacttactgtcaggttcaaacatgctctgcatctttttatatgacagatttttagtcgtgaatttgactgaattactaatcatataatctcgagcagaatatcccatcttcatcaattcacgatatgtgtgacgaggagatgtagattctttaaatcgttttacatcttcattaaatgctttctcactgagttctttaactcgttcaataatatttttacgagtacgatcatccagtgaaagagcctcacgagatggagcaatatcaagtgaacccattggaaacttaatgtaattcacttcattgcgaatgcttagccagttacggtctctaataacaccatcgataggataaacaataccgccatagatagcatataatccaccacgatcaggccagtatctttctggatttacaccgtaatagtcatcaaaatccggaaaataatcaatttcgcggtcaagaccattaatgatagccaaatctttgaatggtcgcatgatataagaaacttcataagcaaagtttctaaagtctttttcttcaactggaactacgatttcaataccagttttatcatctggacccatttcttttacgaatgtaggtttaatctgtggaccatcaccatccatgtaagctacataaccacgaatttcacctttatgatacgaagtaatactaaatgtatcagtataactaaacggagatttagaacctaaaccaaacccgccaataaagtcattagattcagccttagatgaactgaagtatgaattatataacccaggagaattatcatcaccctgaatatcaaaatcactcatacccggaccaaaatctcgacaaacaaatcgcggatctaatcgtcctggaacttgtatgataaatttttcaggatttccattaagtgcatgggcatcaatcatattagtaattaattcacggactactgcacgaatcttgtttgtatacaaatcagatgacagaattttaaatactttaggagatgctgtgatgctaaatgcttttgatttagaaccattgccaagaattgtttctttttcagtggtgataatcataatttcctcattaattcatattacgcttaataacttcagcaacttctagtaattcatctttagttgcagtgtcggattgaattttatctctaatatctttaaagcggtttttaaattcttcggcttctcccatatcgaaaaagcgttgaatgattctatattctcgatgaactgctttatcaaaaagttctaaatttactttatatgatttcatttcaatatcctcatttgcccaattaattataccacatccttgtggtaaagtaaactactggctcatccattctttacgaaggtcagcattatctcccatgagcatttcaaaaagctctttccagttctcaggaagtttaacaacatcatatactggattttgaatcatctcacgatattcagatttttccaaagagccaagtcctttaatataacggatgctatgtttaggtagagcatctttagcactctcatattcagcgactgtataaaaccattcttgttttttaccaatctgtgcgatgattacaggagttttgacaaagcgaattcgtccttgctcaaacagttctggccaattactaaaaaatccaagcagagaaggataaatgcttcctaggccatcatggtcagcatcagtcataatagcgatattatgataattcaagttttcagctttttcaccgagaactaatccagtgattgcgcaaatatcaaatagttctttgtttttaagcatatctgcataagacataccccaactgttgagaactttaccgcgcaatggataaccaccgtgaagttctttatcacgaacatcaataagatatccgatagccgaatcaccctcagtcaagaaaagagtagtgtcagcatctttaccacaaagattcgctttaatatgtttatgaaccttagctttagaagcctttttagctgctttagtttctgctgccttttccgccgccaatttacgagctagtgcagcttcaataatcggcatcagaattgcttcattatttagaatagcgcgtgaaatctttttagcgtcgagttgaatatgactacgaatttcgccaaatggagaagtcaaacgctctttagtttgagaatcaaatcgcatgtttttcatatcacggacaaacataacgatagtcaaacattctttaacgcgtgctttagtcacatcaattttgaacttacgtttgatttgtggaataaggtcttcacaaatatcatccataacacagtcaatgtgatggccaccattcttagtgtgaatgttattcacataagttaattgacgaaaaccatccggtgaacgaccaaccgcaatagagcaattttcttgttcttgaacaatagcatgctcatcatattggcgtgcatatttcttaaaattgccctgaacctttttaccattaaaggtaaattgaatatcaggataaactactgcaagtgtctggagacgatctagtgtaatgtcaagataaacttgggacagctcattagtttcaaatgacataaaatcaggaatgaaagtaacacgagttcctttccattttccaggaatagtttcccatgatttattttccatgccatttgaacaacgaactacaatattattttgaccatcaccagtttcaccgacaaacatcacagaaaaaatgtttgtcaaactagaaccaacaccattcataccgccagtgacgcgttctttatcatcaccaaagttaccacctgcttttggaatagtccatgcagcaacaggaccaggaatttcttcaccggtaggtgttttaaccatcgcttgtggaataccgcgaccgttatcttcaactgttacttgattgtttttaatagtaacattaattttatttgcgaatttaaacttagtacgaataccttcatctactgagttatcgataatttcatcaataagcttaacaagaccaggtacatactgaacactttcccatttaccaaacagaaagcgctcatgcatttcattagcagaagagccaatatacatgccgctacgctttttgatatgttcaatatcgctcagaattttaatttcattcttaatcatcacttatcctcgtttggtttcgggaatattatactccggtaatcataaagctaaaggcccgaaggccttttatttaaaacggatagtcgaatctttgaagaatagaccagaacatactgttccttctactttctgcccggtaggtccaatagcacgaaatccagtgtgttggaaatcattttcagagcaaccaaaccaattatatccagtgatttcaatattagtaaaaccgcttgatgacaaaattttggttgcattatcagtatcagtacatcctgctaaagacactgctaatactaatgctgcgatagaacgattaatatatttcataatttcactcaaatttaatggcttgaaggagactaataactctcaaacgacttctttcatctttaactgtaaaagaaagagggtcaccagatttcatagtaatagtacattcaaaatcaaaatcttcggaaacttctttgaagaagtcaaattcttcatcataaattagaacattactctgacaactatgaagaatttttccatcatttccagatgctgtactaatcattgtaacattatgacctttcatatcttcaacgataaattcactagtcaatattacagcattaatagaactattcctattactagcagaaagtagatatttctgttcttcaccttcacgaatgcgatatttcttaccgattttaaacataattaccctttaagtaagtcgtaaaatccaccattcacatgcttaggagcagaaggccgacgagtagacagacgatgacatttagggcaaacatcattttctcgttcagaaatctttttaattttttcatattcatgcccgcaatcttcggattggcatttataatcatacattggcataattattccttaaagtgtgctttcaacatctgatacaaggaccatgcttgttcattattttcaatagtaactttcatgatcgggaattctgtgaaatcttctatttgttcttgctcttcctgctcttgttcttcagctgcctgatatggattttccacttcattaaagaactcagcttcgctcgttgaaagccaaataaaatcttcatccaaaatatctttaccggaggataacgccaatcttccagtagatgtcacaattttagtaggacgaccaagatggtcaatatctataactttaaaaggttccatacctaaacgccgcgcatagattccgttatcagtatggtctttaataaaattttcttgagcttgtttatttttaaattgataccatttattaacttcgaatttaatagccattaataaatttccttccagtaagttgtgccatcttcagtaatttcacgaaatacaccataaattggctgtttatcaccgactttctcatatacataaaccgaagtcaagtgagtaaacttagcagtgtgttccttttgaactactaccaaatttggatcaaataatacatcttcaaattcatcattagtgcaattctgaacaattttacgtttcatcataatttcctcattaattgaacattggagcgatgcgtttcagaagagtagcagcacctttggcgaattatccattttattctccaagttgttttctgtatcagtagttgatattgatatagtaccataatcaactactgatgtatatagttttatgaaaaaaattttaaactttatgcatagcgagctttgctgtagtgtttaatccaactttcaggaatgactttgtatgttcctaaaaataccgcgttgtataacttaacgccatcttctacccattgatcagtaatgtatgcacacatagcgcgagtacgccgaggaagtggttgtccaccttcggtaaattcaaactcataaggagcaatgaacttgatagcttgaccaagtttccacttaaagtctacacctacatgcgaagtatcaatcgtttcaattcctttagcaggaacagctttcaaaaacgcaggctcaagaaatttccatcgaacataaccaaactggggcttagacattccatctttagcaatgatacgtacttttacttcagaatcttcatctttaacaccgtgtttaagctgaatgcttacaacttcgaccaattttcctgctgctttagaacgggatttatcagatacacgagcaatttcgccgatattaatattcataattatctctcacttgttaaaaaggttttatactccacaggaccattatactctgatcccaagagtttgtaaactagcttacacgaacattaatcactgcgctgcgaggaacgacagaatactctccagcatgaactacattaagaagttcaacgccatcttcaatccactggtcagttacccaaccgccgaccggattcgcgaatggacgacgaatgtaaactgccttacacaacaaatcagtcgggtcttcaattttttcaactggtgccacatacatagaaactaaatccatatcaatatgggatttttcctgttcttctttttcaatttctgtcaatagactaaaatctttttcataaataataagcgatgacaccattccataatagtttctaatttcaatatacatcatgccgataagaattccgctattaacactaataacagtaaaaggatatccgccagttaaagcaagaagttcacaaaacttattatgagctgtattagacagtaccggaaaattcttaatttcatcaaattttttcaattgataaacagcattatttttaatcataattttctctttaatctaaggtaataaagccttttagttcggcatgagatttgcggaacattacttgatgcccgccaacgataacttggtcatctggtacttcgtatacagcaagataaaatcctttcgaagataattcttcacgctcttctcgtgtgaaccatctcatcatatcatattcgctagcaaaagcaaaatgataaagagctataaaccatccgggaatatgatattctactccaacataatctttcttgaacttagtattaattacgatattagcatttttaactaatagtttatcttcgtgtggtaaaggaattcttttattattatcgctatgatgcataaaattaggtctgtcataacctacgtgtaatagccactcttcgctccatgaatctattatactcctgtacggcgttatttgaacacaaagatttcgacgtattgttatagcatcttcataatcaagaatactaaacgatgattcaacacgataaattttcattttattatcctcagtagctatggtgttataataccacaactaaccgaggaagtaaacaactttttatcgttttgttggaagagatagaggatcgcaatcttcctctgacggagcatcttcaagacccatagcatatcgcaaagcgtacttcatcatcaggatgtctttcgcacagtcatgaatagaatcatgcgcaacgaatccatctaaagttccttttggaagaggacacgtggtcatatcacgaacaagcagaagtgcttcaattctggtacgaatatcacgctgattccagaatttacatggttctaacttaaatgtgtcaagttcattctcagaaacaccattaagacgttgaatatcacgaatgagatcgactaaaattggaaaatcaaacgacattccacggcaccagccttgagatttccaaggatcgatattatgtgcattgatgtaatcattaaatttcgcaataccgtcgatagtgcttacatcttcatcggacggtgcaatattttttcgagcttcaggagactgatttttccaccattcgatagtgcttttagtaaaaagacgatgtcctttttggctttttaaatcaaatttgattttaatgccacgtgaaactaattcatcaaatgtttcaacgacttctggattagggtcaaaagcaattacagccaaatcaataacagctgctttttcaccgcttcccattgtttcaaaatctataataaaatcaaacattaaattttccttgctaaatcgcgaatttgacctacagtataatcttggatataaactttattaataggctcatcaataaattttgccatagattcaatatctttttgtatctcttcaagactgtatactatctttaaagctttttcgcgaatagtaatattttcaggactagaattttcctcaatgacagctttaacatttgtcataagagatttaaactgacaccaacttaattcaatcattaataaccgccttataaagatggctaatttcacctaaaatgtaatcactgattgtaacagttttcacttcaccgcaaaagaattctaacgcaatcaaatctcgttcaatttcttccaattgaagcctcaacttactagattctatttttacagtttcacgatttttgctataagcaatttcataaatttcgctcactttatcttgaagcagataaaactggtctttagttatttccacgaatagcttcctcaaatttaatcatacataaaacacatcataacgaccacgggtaacaccaacataaagaagttgttgagccaattcagcatctgcataatgaatacaaggcgtataaatgaaagcacggtctacagacataccttgagctttatggaatgttgatgcgggaagtgctttcactttactaaactgtgatttagcatcccaaaaatcactccacggagcttttccacctttattccaatttttataagtttctgccgttttacctaaaaataggttaaacttatataactcttcatcagatgaaattattttaatcttttcacgataatattcatcatcgccgtaagtttctactgttaaatcccaatgacgaattaagtattctccaggaacaccacgagctttaacaaacgtcgatgtatactctgcttctataatacgaactaattgtccattattaaaaataatttctgacacaggctttccatcaattttatatgttttaattaatggttcctgcattacaataatttcaccgacaataaaatctttatcagtttcaaaaatctttttacgaataatgctatttaacttgtcaacagatttattcgtaaatgccattacgcgattttcaaacaaatcatctaatgattttacgattgaaaaataatttaccataaaatcgcgtaaagcggtatcaccagtaaatccacgtactccatgcccgtcaacaactttatcataaatccacttaccgttgcgaacatcagtagctacatcaataataggagcattactgcgtttaacttcagtgagttcacactgataaaaatctttatgtgtaaagaatggactgatataagcagtgttttctcctgggtcaacaggtctgatttgcttattatcacctattccaattatggtacaccatggcgggatagttgaaagcagaattttaaatagctttctatcatacattgacacttcgtcgcagattaatactctgcatttagctaaatccggtacttctttttgttcaaaaagaacgttttcttcatatgttactgggttaattttaagaatactgtgaatagtactcgcttctttccctgatagttttgaaagaatctttttagctgcatgtgtaggagctgctaaaataataccagtttcacccgtagatattaaagcttcaatgatgaacttagtaatagtagtcttaccggtaccggcaggtccattaatagttacatgatgtttcttttctttaatagccttcataacaatgttaaaggcatttttctggccttcggtcaaatcatcaaatgtcatcgtaaattccctgcaattggtatactaacaatacgcccagtatctaaaattcgctgatataatctttgtgtgtctacgtcaggcttaacatgtttaacttctattttattaaaccaaaatttacgtggagtctcaactaatcttggaattcccttacctaaagctagtcgatactgctctttaagagtagtaaatactttatcagcaatctccctttcaaaaaatacagcagggcgatgttcatcaagcggaactggcgccgtaaatccatctttatctctataaactatcgcatatacataaaacatattatcctcggataagtttaaaaattgaacaatttagcgggtatcctcttttcagtttaagtttatcaataaaagacaagttttgataccgctctacaccttgaataattttatcacacatatcatattgcatttctgcttctgacaactttttcacagttttccaatccgagcctttaagaagaacgttcaatttaacaacttcagttccttctgctatacgagaaccatcaatacgagctttaagtgctataatcctcagcttaatgtcagatgtctgttttgatttagaaagctgagaaatgtgttcaattcggttttcacgttttttctgtatagctttaatttgattataagtctttttgattttagcccatttcttttcatctaaatttagtttatgaacttttttcgcagatgaacgaccaattcgcaaagcaaataaatcacgcttttcaatcaactcctctaaagtataatcagaacgaaatgtattatactttttctttactgcaataacattccctttaatgtatccaacgttattatcaaaacgttctaatgataatttctctccttcaatacgattatcaaaaggttctcctgagtaagcgcaaactttctgatctaaaatgttcttaatgtaattgaagtctaagttaaaatctttagaacgtcttttagcagatgcctgagtgtgctctagacgacgtgtaattttacgaatttgatttttagacagtttcatatttttctcacggacgggttaactacttatactataacatttttacttcagcttgtaaacaactttatgaaaaatgctttaaaactttcatggtataatgaatctaagtccttccattatagattaaatccttcaaaatcaagagtatagatagtgtatgttgaatactttttatactcgtatctatccgcaattctaaatacacttccagctggtatcattacttcttgttcatctgaaactaattccatattacgatagcgatggctatccggaaacttaaaactcggactatattctttacaacgtaaagcttttatagcatactcctggaaattaaacaccataggagctttgaattcaaaaataacttgtgtgttgtattctaatccagaagcaaaatgtagagctatatttttatcatatgaagctgatactactttatcaaatgtaataatatcaattccttgatttaacacctgtttagtctcaactggaacacctctccaaagaggtttatcgtttggaaccaaacgagatttgactatttcatttaaccaagaatgatcgtctggtttattagtaatacaatgaattaaaagttcaatttcagataaattaaatccttcggaaagtaattcttcacgaatagaagcacgcaccgatgcatccattgattttattttaaaatcttttagttgcattactgagtatttcattcaactacctcaatatcatacactttaaatgttccaaatgaatcgtgtaatttttcttttgaaatagaagttattttatactttccaattggaatcatccattcttgttcacgtacaatcatcattaagttatcagtacgttctgaatctaatccatcagtatcttcatatgtatacttaaattcagtattaggagaagaaagtataatatcgctgatatggtcagaataattaaaagctttatcagtttttaagcgaaatattatttcagtgaaatactcaacataagaaaaaccacatgctatgtgcaaactagtagtaaatgaatctactctgttcgttgaaaacacttctccaacttgtaaatctttaatgagttcttttgtcgattttgatataccacgatatagctgataaggcgatttagttaaatgctttttaacgattttattcaactgccgatgaagagcttcattctttttggcttccatacactgccaaagaactgactgttcaaagtcagtaaatttttcacagacctttttgtacatatcatattgaaaatcgacactttcagcttttatagataactgttcaacatctgtgagattaataatcatgatagcctccatatacttcagaagctatcatatcattgttaggaaggaaagtaaacaactttttgaattattttgcccagggagcccaaggcggagggtcaagatggtatgaagctagttcttctagaagagcatctggggcttcaattccataattctgtaatactatacggtactctttcttataatcactagaatcattctggatattcgtagaatgattatcttctaacatctcaaataaatccatattaattcctagcgataaaaaccaaaataacgattagcttcaataatctttctttcttcttcagacattctccagcgtagtccaacatcaaaatgagcccagaccatcttaacaaatgcatttatatctttaatatcttcaataatgaatgatttacttttagaaggttgactcgctaatttaactttatcgtcttcaaacaggtcaaaaagaccatattcatgggctcttttatagcctttaatagttaaagcttcagaagaagaaaacggtgaatcagtattctgtaaaatatcttcagtatgctttataattagaataacattttctggatattttctttcttttatatctttaattaaaagatccggattttctgctaaaggaataattaatgagcattttttatcaagtgcatttactgatttaccttctttagacataaattctattgaataatgttttgctacttcaatcatgcgatttcctcttgcctactaatggaccgtcaggaattttgttttcctggatatatttctcattttcttccatcattttactgccaattttaagaagcaaatccattgcttcatttgctttagctttagcctcttctaatatcatatctctgttcacgatttatccccatagatgtctctcattaatttaagcgctgagcgttctaatttcttttctttctcagcactaatcattgatttcatccattcttccgattcgttctgcatttctttatttgcttgttcaacccaaccatcatcaatatacatcgagtttggtctattgaaccattcaagcatcttcttcagagctttcatttgttttacctaaaacaacagtaggagcatcatcaaattcatgaatttttagcaaatttggatgtaaactattccatacagaagaaataaagtatgataacgcatcttcacttgcaattataaatttatttcctttatctattttccaactatatagtgaatcgtacgaataaaaagataaaggcttatcattatattgttctgcgctaacattaatgtattcggatttagtaaatgcttcaattgctctaaatggaatatttggtacagtttcaataataccaatctttttaagttttatttcagcatcttctggaactggcattgaaacgaaattttctacgagatacattgggtcacaataacccttatcaatcattactgctacggtaattggaacgtctttagcaaacgacatactattactgctaatatacatttcaaacaaaatcgcttccataattttcctcaatcacaagatgtagatgaacaactagaatcacaagaacttccacatgaatcgcccgtccatacatgaacaggaacattagtgtcatatgaatcagaactagactgtgtattctgcgtattagatgatgtaggtgttgaccaacgccaaggatttttataatattcctgggcttcttcataagtcatagtaaccgcttctactgttccatctcccatataaacatattcaactacagttaaaggaaggtagtcatttgaaataggaactacaccttctccgggagttgtagagaaaaaatccgtaaagaaacttttaaaccaattaaagataaacattacaaaaagcctcttttgaattcaacttgcttctcgccataatcatatcgaatctctgcattaaattcaacagaaccatctgcgtacatcataaatgaatgcacaacaacttctgtagaccatggctgcagttcatatttcttcattacatgtcgtgaaatgataatatctaaatcttcatttggtttaatccaacgatttaacatagtgctctcctctataagataattctattataccatactcattttggaaagtaaaccggtaaaatgaaaaaaggactcccgaaggagtccttgaattattaaccacctatttctgtaggcgtaaacattgcagcattcttagttttccaagttgctgcatcggaaactacatcagaataagctgctttttctgacggaaagatttgataatgagaatctgcaatacggtgttcatttgaatatacatcaaatgctacagaaacttccatacctttaacttctttgccttcacctgctggatgagtaaaggtcttgatgttaacgaaaccacccataataaactcctttattgtttaattacaggtgtatttatatcagtcttcaatgaaaacttgtgccaggaattcgtgttcatcttgaatttgtttatataaagccattacagcatttatattagagctatctactttaagttgataggcataccactcgtataaattaattaaagctttttgtcgtctaataaattcttctttggatattttcattttgaatgctctataattaattttaaggcttctttactgacaaaaatttcatcaagaccttcttctacaccccaatcaactacacgaagctgattagataagagctcgtatgtgagctccttgtcataatttttaaatagctggtcaatacgtttcttgtgggctttcttaagctggcgtttatttaaacgagccattaataacctcggtcttgacgagcgaagttttcagcatttttcagataataaagtttaaagatttcttcagccgtaagaccgaggccttggaacatgttcagaacgaaatgaagaatatcaatcatttcgaatttaatttccaactggtcttgtggagacaaatcagtaatcagagtttcacgtcgttcaccatgttgagctttccaaggcttccatacagcagatgcatctttttcaccattgctcataccaccaagagaagtcaatagttcgcggaattcatcatcaatataatctttctgattacgcagccaatcaacaacttcacccgcagtagccaaatcatcaggatgacggttatattcaggtttatctttagctaaacgaacctgcagagatttctgcatatcaagcataacttgcaacgggtctttttcatcaccgagaatatcccagtattcattttgagctttatcagcgccttcaatcagttgtgaacattcattaaagtatgccattatttttcctttcaattcatgggttagtagattaattatacaataaatatataaagcaataaggaggacatatggtacaaaaattaatggcacttgttaatgccatcaaaggtaataaaaagcgtatagcttttactatttctgctatggtaggaattttactctggaactttattttatcacctgttgcaattgcacatggtattaatattccagtagttactcttgatacattcgtagatttagcattcgctttagttgggttaatttaaatcttagcatatttagataaccgcattttagccatcaacccctgagcaatattatttttcatatattccataatttgttcagtggttgcaccttcctttctaatcatatcattaacatcttttgatttccagggagatttatcccaaaacataaccctttctcctgcatcaactaatttagtcattcgcttaatagtgtcaggatgacgaggttcattatctaaaacccacacacgtctatctttaaatggaacaacttctaggtctaattgaccacctgtaatagctataccattttcaataaaaagcgaatctataggtccttctagaacatatacatcaccatctttgactcgttcgactccatagatttttgttgcctcaggataagctttgatggtgatatatttttgaggagcatctttctttaatgcacgtccttgaaaagactcagcttttccgttagcattataaattggaataacaagacgaggctcaggtgtttcctttttatatgttcctggagctatactattaactaatttaggccattcagttgtaaaccaaagatatttccatttatcctttggaatacaacgagcttttacatattttataattggatggtcttccgccaatttatctaatctgatgcatgacggaagagatttaattattttcttctcaggttgtttaggaagttctttaggtttttctactggacgacttttacctttttcttttcttatttcaaagatatactcacgatataaatcaggttcaaactcctttaaatatattccgattggtgcatgatagttacagttataacaatgaatatttccttcattattatcaccataataccatccacgagctttattctgatcggtttttgaatctccacaaacagggcatctaaaccgcaatttaaaagttgaactattatttacttgtgtgaatttaggtaaatgagctaatgcacgatacgcaaactcattatcaatccaaggtattgatgacatttttactcttctttttctttagattcctctttcttctttttaggaatctgttcaggacctttatttactacagcgcctgacgttgttccagtagagatattttcaggattaccacctgaatctccagctaccatatcttctttaataaattctttatatgttttcatattaacctctattcataaaagcattaaaaatttggtcatcaatagatggcacagtaatattttctgcatcatttagcaaatcattaatttcatcagatagcataacacatgtgcctttatttcctgtaattgttactgcacaattacgaacgttttctttatcaaattttaggttaatattttcgtagtgaaaatcctttaatgccgaatatatctttaaaatgaaattgtcttttactacaataaacccaacctcactattaaaacgtggttcatggaaactgtaataaaccttttcatctataaaatcgtatgaaattttttccatttttaaatatgaaaattcagaactatacatattaacctttattcataaaagcattaaaaatttgatcgtcaatagaaacatttactttagactgtttttctgatggtaattcatatccacatattacaattttgtgatcaatatcaaaatacacagaagcaatatgattaatgatgttttcagtaaagtctaaatcaacatcaatatctttttgaccacagcccaaaggataaataatgcgagtaattcgattatctttaacaaatattccaccgacatactctgtgctgcgtttaaagtttacacgtttcctaaatgaaaaatattcaggttctttatgagcccgactcataggacacaatgagtagctagaataagagatgtcaaatcctacaccttcaatatgagccaacgcgtcatgattaaaccaattataatcatatgccaaatccattatattgtaatatgtgaaaggcaccggattaacatcatgtgttgtacctttaaaatctgcccaggcaacgatttcgttatctttaacaattacaaaaattgtgccaataagatatccacggttattttcatcaggcgttatattataacattgtgcatcaggaaatttaccgtatttaaacggtggatttttgtgcatataataaatcatattattcacctgtgatttcggttacgatatttttgttattaaagtttttatcgcaatacagaacataattatactgcattacaccgccagacttaagttgtttttgcacttcggccttaatttcaggacgatcacgctcaacgatattcataatatctgcttcaatttgggtttcaacttcagtctgatctgcagtcatagaccattcacacaagtctttatcatatcctgccatagcaggctgagcagcacaagaagccaaagtaaaaattgtagcaaaaataaattttttcatgataatctcctcagtagtttatgtttatatagtatctcaatttccaacaaaagtaaacagctattttaaaacttctgcataatcacatgttacaaactgtttctctagcttaacgatcttacgaaagtatcttttgcattgacgaatctgccgtttcgtaggacgtacagcaaacttaataaattccactcgaccaaatggagggctttcttctgccggaatatctaacaccaattcccacgtatccgcaataagtgctttgaattgagtatttttcctgacgttatacggagtaggtttaaataaaacaatatgcatattatcctcggcaatctacttcacatactttcttgtcatcaatgaaagcttcaactaatgctttattaacttcagcatattgagtagtagcccattgaacgtcatctttcatcattgtgatttctttagtaaacatgctttcattcttaaaccaccccataaaaactacctttaccaattccataacaatctcctcatttaaccaacaagactactataccatagtcttgtcagtttgtaaactaaaattttaattcatttgccaaagcatctaactgagctcgagtggattcatttctttgatagcgattctgttcagcctgaatctgttgtgaacctgctacttcactcacttcggttggagtagaatcttgttcaatttctacccatttttgatttcctttttgaacacccatcaaaaacttattccacttattcttatcaccatatcgtgatttgatttgcttaataagttgttgttcagcagctgctagctcctcggtttcaatgaccgcaagcataaaatcagctgttgctggaagaccagcagattctgcaatatcactcatgttaacatcagaagagtcccaagcttgtttaccgacctgtgctgcagtccaaagaacagtttcggtttcaacagccagagcacgtaattcctctgcaatagctttaacagttgtgtaactattttctgaataaactctaatgcgacaagatttacaaatacctagatagtcgacaataatgatcgttggaacaaaattctttttgagcttcaattcattcaagagagacctgaatgtattagcgtctgctccaccagtgggatactgtttaacgattaaacgaccgagagtagatttctcacgccatttttccatttttcctttatactcggcgtaagaaatatgtccatcatcaatatcgtcaagagaaacatcgagcatgttagcatcaatacgtttagcacagacttcttctgccatttccatggagatataaagaacgttatgaccaagctgtaaataatccgctgctaatgaacaaagtcctaatgatttaccaacgttaacgccagccattaaaacgttcagtgttcctgtctcagctccgcctttagtaattttgtttagaattctgagtttaaatggaactttacgagctttattcatataagatagccagcgtgcttcgtagtcatccatccaatcatgaccaacgtagctatcaaatgaaattgataatgcttgacgcatgatatcaggaatagcacctacatctggcattttcttatttcgtttttccggaggaagctcagcattagtttgaatttcgattattttagacgtagcattaaacatcgccctttgctgaacatatttttctgtttcttttactaaccaactgtggtcttctggagaatcggctagttttgaaataagtgtttttacaccagaatattctgtttcagtaaatgaactattttctaatgcaacatttaacgcattaatagatggaacgctatggtactcattaacatgagatttaattaatttgaacgtatttttagctggaccactttcaaaatattctgaatccatatatggccaaacttttgaaaaataagcttgatcaaatatgagatgagaaagaataatttctaccacacttactccttaaaagaatttaaactttttctttgaccttttattaaatgcatcttgtagttgcattgtaatacatttttctacatgaggagctaactcagcttttctttcttggtcaagaacagcaaagtccattacgacttttccatcaacccaatctaattttgtcacatacacaatgtgtgtagaaccatcttctagtttaatgacaatctcctggataacattttccatggcagatttaattatcttaagagattcattaaaaagacgttcttttctttcttcttccccctccgaagagggggattcatcgataatttctagatctaaatctaaatcatctttattcattaaattcttccatatcacttaactgctcgaggtcagtttctaaatcagctgctggtttacttttactttctggagatttaaatttttcaacctttgagttaatcaattcatcaacttcagcttcaacaatttcattactatcaatagcacctaactgataagcgcgtttaatagcatctcggaatggttgatgcttaaataaaggaccccagaatgtagtgcagttggtatcttttgcacgccaagatttttcttcgcgaatcatctcgccggtttcttcgtcaagaaattcacgagcataccaaccattcttaggttttactacaaatcctaattctagagccatatctaacaatccagaataaggatcgataccaccgtcaaatttaacatcaataaagaatttacttttttctttaacggtacgagatttttctacatttagaacaaattgatacccctgaagatcagaaccatctttaatctgacgcttaccgataatgaatacagtatcagccgaatacattacgcctgtaccacctgtcatcacggttttactaaacatttcaattgtttcaattgtatggttaaccgcaacacatggaatatttttaatgctaaagtaaggagtaacaatacggaataatgacttcagtgatttagcacgagtcatatctgccacagatttttcattcaaggcatcttccgtttctttcttagaagccatattaccgattgagtcgatgaatacaataaccttttcaccacgctcaatagcttcaagctggttcaccatatcaattttcagttgttcaactgactgaattggcgtatgaattacacgttccgggtcaactcccatggatcgcaaataagctggagtaataccaaattcgctatcatagaatagacaaaccgcgtcaggatatttgttcaaatatgccgcaaccatagtcaaagacatatttgatttaaagtgtttagaaggccctgcgaaaatagttaaaccagactgcataccgccatcaattgcaccagaaatagcaatattaagcattgggatttttgtacggattacatccttttcattaaagaatttagatgtagtcagttcagcagtcattttagaagtggaagctttaatcaaacgggattttaaatctgcaatagacattcattttttccataggcatcattatattttcctcactggttaaagatagagtaattataacacaataaatttaggcattaatcaactgctattggatgaatagcattaaacttatgaaatgcttctgatttttctttgcgcgaaacacacatgcgaagaacctttaatggctcgtcttcttcacccaacgattttcgtttttcaatattagaagttttccaacgagcttgctctggaaactctctattgatttgctcaagagctctattatgttttgaattactacgaattgaactgcacccgcccggagcctgtgcttttccagatacaaccagatatttgaacaaggccaaatgcggataaccttgattaattaaattgagaaatgcatacatatcttcgcataaatcaatttttccatacccaatttgttctgttgtaagttttccaaggtcataccatgtattcgtgaatccatatgaattttcacgataattaccccaagatgaagtaattttaaaaattggtaggcgagcatgaccgtgataatacccgcaatccatggcatcttcgacgtattgaatcaattcatagaactgttcatgagtcaattgattgactttatccacgcaacgacggtcatctctttttcgcattgaactcatacgaatagtagtatcatcgtcaatcatccagattcgttggcctgcatacatatcagtaattgctttacgagtaccggcaattccgtttacatcatcaggaatagttataattttagctctagacccataagcatcataataagctttttcttcgtgttcacgcactacaatatggggttcataatcagtcggaaacatattaagggcagaaactgcccctacacgctgataacttggaattacgaattgaatcatttaagtgccttacatttgtcaaaatggtatcttgtcatatttggcccacgtccttttagtccgcaatgcggacatattttttctatcaaattatgaggttttcctttacgatttttagacatcgtttctttaattattttagctttttctacgccaaaaatttcttcataagttttaccagaattttccttggctcgatttataattccatatgcctgctcatttttaccatacattggattaccttcgcctttcattcttttagaatgatcaggacgcttgattccacgaaaggcatttccgcacttatatctttcttctggagatagttttttaccgtacattccatttaatttgcctggaaaacttcctccccatgcttcattctttaaattatatgaatccggacaattagcagcatctaaacaagttaaaataatttcttcaacctgtctaaacattggtccttcatataatatttctttattaaaggattttattccatatttctttttagcatgttgccaaactacacccgaaccatcataattcgggttgtgaccatcatgacttcctatataccactttttagttttaggatgtttatacttataaacatgtggcacatttacttccattttccagtataatcctttttagcaatatgagtctcaccggtgttccaccaatggtcaactaaataaaactgattttcgtacacatgaagacttccaacgttccatataatagaacctgctttatattgccgcgatgggtcgcctgcattcaaatcagatactaatttatctagtacgtatttttgccaagcataatcattacgatagcctgcccagcaatcattgcttctcatgctaacaaccgcattgactttcttatcacgaatcaggtactgtactgtattagtacacatgaaatctgacataccatctttattgtagtcaaattgcatggatggacgagtataaatcatgataccacgtcgagaatcaggattttgaccaagttcagctaaacacatatcatactgggcatagttatcttctgaccagatagcccagccataattcgagttaatttcacctttagaagatgctacttgttgccaaatcttcggtgtttcacccggaatatctttaacgaacaagctcttagatttataccattcaagttcacgctgaatgtattcatcattaagagcgccaaaaataaacggttcatctgctataaatgatgcgccaataatttcaatagttttaacgccagttttatcaactacgaaatctttttcttttaatgcaagccccaaatgaagacggatttcttcaactgtcatagagtcactaatcatttaaacctcaattgatacattcatatttaacttgtaacagtaataagctccaacctaaaataatagttggaatcataagaggaaccgttacactatagtatatacttattataatcatcaagattaaaagcaacactgttataattttgcttttcattccttctctctgatgataattacctgatttggttgtgcagactttttagtttcacccgcaattgaccaaataaatgtaataaaccaaccaataattgaccagttaaacagtaaagatgtgaaaaagattcctactgtcgattttgacccacgcatcaaagcaataaaccatggaagcatgtatataataatagccaacacacctgaaactaaaaccataaaaattgaacctgctactaaagtttccatgttttcctcacttagtcaaattttttacacatgaattataagaattcactacatactccatcggagcatttttaccagtacgccattggtaattattagcccaattagcccaaatttcggcgcagtagttttcaattttttcttcgcgtgtaattacatcagaattacgatatgcttgagcagattcatctggacgaatagcttcgtcaaaattcgcctgcatttgttcgactgtttgctttggagcttctttataacacttgacattaggattataaaacttgcttgaacagtttacaatttttcctgcatcagactgatttactaccggtccttgagctacacaaccagtaagacctaatgcaataaccaaaatagcgattttcataataatttcctcaaatgcaagtagtaattactccagtagtgcttatgcaggtattacccatttgcacacctaaagatccatttgtattcgcatgaagattatcatcaattttaactgatattttaccattagtgtgaataacagtgctagattcaatcacaggttgagtatcattttcaacactaacaaatggaactgctgctaatgcaactaaacaaactgctaagcatcccataacaattttcattttattctccaaatccgtatcagtagttgatagttgtatagtaccatggaagaacattcttgtaaacagttttgtgaaaattttttagggaattctaaatgtccagaatcatctgtttttcataagtatagatttatattacttgtatgaaaaagggacccggaggtccctagatttattctatcagccaaacaggaagtctaacgaagctttttcttcatagtccataccagccgattcacacatgcccgcaagcggtttaacaaacgatttttggaacaaagttgagtagtcaatccaagacagtacgtcagaacgaatttcttttggaagttctgtacccgacggccaagcaatgcatttgtcaccaaatggatttccttcacgcaatggaagaaccattactttatttccatccaaaattggagctacacctaaaccgctaacagctcgacgataagttagcacaccacgaatatggaacggacatttaaatcctggccaacctttatcatcatatttcgctatatcgttcgcagtttttacttcagcaataactttatagtcgagttgacgatattctttatcgaagttcttgtaatattcttggacagactcttcaccttcctgaagaatacgacgaatactttcttcgagagcttcttggaccgctttgggcgttgaactctgctgagtttccatacccatgatttttagatgcggttcagcaaatcgcttatcttccatatcataaacgttcagagcataacgctttttcgctttccaaaatccaccaacgccctttgaaccaagtggagggcaagaaatagcttcacggtccatatgcatcagatgctcgcggttattcatataatcacataactcacgatatgcaacatcaatcataggttccatctttttcttaccgaactgattcatgaattcaactaaatcgttctgctctttgaatcggtcaagaccaactttttcaataactttatctacacaaacatataccgaatcagtatcacctgctgcgatgaaatcttcgccattggttccgcatactttattcagatattcattaattttacgagcaatccactgaataccaacttggccgaaaattgtaatagcagtagcatttcgcaaatcatagtaacggaaatgaatattaccaagagcaccataaagactgttaataagaattttacggttcagctgatttgtattagcaagtgtagccgctttttcacattcctcaatcagactattgagaacagattcagtataattcgatagttcatttaagaaatcatcactgaacttaacatatcgttcaacttcaggtttagttgaacaagaccctgcgcctttcataataatctttttaatagcttcggcattcatttcttcagcgaacattttctttttccaatctttacgctggaaaaatactttagcgatttcctttggaatgataccttcttgatgcttatcatacatccatccattcggagaacaagaatattcatcactcggtttaggagctgttcctgcgatatattcatgaattggatgaactttaaactgaccacgaatagtctcaggactaatgttaacctgacgaataatgctaggatacagagacgtcaagtcaaaactcataatatatcgacgagcaattggtttaggttcaaatacaaatgcacctggaaaactttgtttaacgtgcgaaccttgttgaggaataaccttatgttcacctttcaatgagttaaaaataatagcatcccaggttttaataggactcattacaccagaaaaaggcattttagcgtaataagacatacttaaaactagatcgataaacccgcgaattttatcaattgcttgaactgattctacgtcaatgatgttataactaatatatcgttgatgattagtctcacgaagtttattaataggaccgtcgtatggtaatttgccctttttagtttcatgctgagcaactgattccaaagagaatgacggcaaattagtaaatgcgaatttcttatacaaatctaaataatcaagaatagatacgccatcaatagaataaatttctttgctgccgtacatattttgaattagtttagattttacccgaccgattggagagaagcgtttcatactgcgttcaccgagaaccattttaacgcgattcatgatatacggaacgtcaaatccctcaatattccaaccagtaaaaatagcaggtcgtttctgttcccaaagattgatatattccatgagcatatcgcgctcattatcgaatggcatataaattactcggtcaagaatttcttgaggaacttcatcaccaccttcacagtcaagcttagcagctaactttgcatcccattttgatactgaaccgtacattgaattcaaaaggtcgaaaacataaaaacgatcatcaattgaatcgtaatgagtgatagcatcaatttcatattcagctttcattgggtcaggaaatttatcaccagtaacctcaatgtcacagttagctacacgaacaaattttcggtcataaacaatttccgaaccatatgtatcactgatataagcgagtttaaaatcgttcataccgagagcttcgagaccaatgtcttccattcgtttcatccagtctcgtgcatctttcattgatggaaatttttgaggagcacaatttttaccataaatgtctttgtattttgactcttccttacaatgcctaaacatagtcggaagatattctacttcacgagtacgttcctttccgttttcatcaatataacgttcaacaatgttatttccgactgtttcaatagagatataaaattctttcatagatattccttagtttatagcccgagttattaggctcttgatatattatactccaattaaggggccgaagccccttgcttaattaccaatcgtatatttaggaacgagtttccattcatgcttttgtttaaaagaaataactcggaagttattagttaaatctttcataaaagttctttgaccaggaacgatttcaatcagcccccaatcttctaacagccacgcaatcgaatcacgacgaacttcatcttcttctgtcatttcaacctgacggccatccatacgaagcatttctttaaaatgaacgatatagtatagtccttttttctgaagaatatgacaggactgatacagaactttatctttattattagcaattcccatacgagtcaaagtttcttttactttcagaaaatcttcaggttttttaagagtaatttcaatcattttaccattccaatgctagttttttgagttgtttctgttcttttacgttcttagtcacttctttcaaaaaatcatccgtgactaatcctttaagttcttttaatactaaaggtagttttccatttttagtaagaattgatttatagttaattgcatcatttgtattaacttgataacgcttagcaagtaacttaataatcaatacttcggtggaatcttcaactagttttgcccatttaccatatcttttaccacgaggaactgcagccattagataattaaaatgagcttcatcacttaatccagaaccgattaaattcatagcatatacagctggcatgcactctggaaattgtgataatgcattttcaaccatgaattttgaataatctttttgagcaatagagcatttagttttattattaatagctccaattatttcaaaaaactcattttcagctttttctttaaaagaatcagcagcggattggacagccgtccaatcttttgaataccaagcaacttgatgctcgtttaattgaatatcatcttcaaataagctcatatcacttccactgcatttcacatgctaactgaatgaaaagataagctaaatgcaattcagtattagctgcaataccatgatactgattattttcgccgacaatttcgtacatacgaataatactctgtggagttacacgtgaatagatttcttcggcaagtttacccacgaaccacgaataatcggctgcatattttggtgctaaagctctgagttgtttaacatctttatttttgagagactcaagaacatcatcaatagcaccacgatcgttagtaaccagtgataaaataccagcatccaaaacacccttagatgaataactatcgagctcgccaatagttttacgaaaatcaggaaaattctttttaaccaaagctgctacaactttcatatcagctatagcaattccttcatgcttgcagatttcagtcaatcgacgaatcatctgcttcatcatttcaattttatcttcatcggtcggttgaccgaatgtaataactcggcagcgtgactgaagtggtttaataataccatcaatattgttagcagtaataataatactacagtttgaactataagcttccataaaggaacgaagatgtcgctgagactctgctaaccctgaacggtcaaattcatcaataacgattactttttgacgaccgtcaaatgaagctgcgctggcaaaattagtcaaaggaccacgaacgaaatcaattttacaatctgatccattcacaaacatcatatcagcatttacatcatgacacaatgctttcgctacagttgttttacctgttcctggagaaggagaatgaagaataatatgtggaatcttacctttacttgtaatagatttaaaggtttctttatcaaaggcgggaagaatacattcatcgatagtagatggacgatatttctgttcaagaatgtgttctttttcatttacggtaatcataatttcctcattcaagttttagtgtaaattataaagggccgaagccctctattaaaaatcgtgggtagaatcagcttcaagagctactacataattcgcatgttcaccttcaaatttagcagcaccttgtttaccttttgcccagagcagaagtttataatttcctggttgcattttcatatttgccatattgataatgaaattaaatgtattttcaccatcataatcaccaagagtcaaagaatatttaacacgggtcagagcagaatcttctactttattaaaaccgttaattacgattttaccttcttttaccgtgatagcaattgtatcaatttgcagaccacgagatacacgcaacagttgttgaaggtcttcagctttaatttcagtaacaacagatgctaccgggaatggaattggtttattaggagcaactactgtactcggatcggctgctggccaaaaaattgttgagcgggcatcagcaattttaatatttccatcttctgactgggaaatttctgcatcatcattaactagagacaaaataccgagaaaaccgttcaaatcgtaaattgctacatcaaaatcaataacgtcagaaatatttgcttccgcataagttgtaccattaactgcgcgagtcataataaattgaccggatttaagcataataccggagttaatagtagcgaaatttttaagcagagcagtagtatctttagacagtttcatgtaatttccttcaattcaaatgagatttaattttataactaatttaataaagcaattaacgattaaaatcagccgcaattgtttcagcaacaatttgagcagcaacaattaggcgttcatctgcattaccgcaatattcatcttcaaggcgttcaccgcatgaagtcataataaatttagcaccggcgtttagggattctgtagtatgtttgcgcattagttcaatccatttattacttacttcacgatcgatagcttcataatacgcatgacgagcaggtgcagatttaattttgttctgaataacttccattgcgttatcagaaagagacaaaacccatgctcgacgaattttattttggttttgtggatttgattcagaacgcacgtgttttggctgaatatcttttacgtcaacagtataattcacagtaattttagtcataatacacctttagtcataataatcagtaacagtccaagcttcatttctattggacattatttttgtatattctgctttaaatgcattcctaagcatagattcagtaactatatgctcttcattagaaaaattatttctcagaatatatcgttttatttcaggaatagttaatagatgttgtccagttgaatattccatgtttttcctccacagagattatactctaataaattaaagcataatctcttataaattaaatcattacagtaaatcgaccaactttcttcatttgaagatgctgaccatatgcttgcgggtcatggtctctatgtgaaataacaaaaacattagtattttttaaactatctaaaatagttgaaatagcttttacaccttcaacgtcggtcgctgaatcaaaaacttcatcaagaattagtgtgtttattttaacacctgaaactttttcagcaatatcacgccaagtaaataaaagagcaatatcaattcgcgctttttcaccttgactgaatgaagcataactaaaatcttcacgaccacgggatttaattgtctcattaaattcttcatctaatgtaaacacataatccgcttccattattttaagataatggttaatctgcttattaaataatggaatgtactttttaataatagcacctttaataccagaatctttgagcatatcagtcaaaattcctcggtggtatttttccattactaaattagtttttgtcttaacaattttatcaagttcttcttgaagcagtgctatttcatcagcatggtcaataaactcagaagatgctttttctatagccgctttaacttttttagctttatctaccgtcgtgattagagattgctttttattgcgaatatcatttgccaacgactgttgggttttaatattatctcggtattcatcaacaagaacttttaaattatcacggtgtgttgaaagctgttcaaacgaatgcgtacattcagaaactttatctttaattttagaaacaactttatcaccggaacttaattgtgacaaacaggttggacataatccaccttcgtgatacatattaatgactttattgtacgagtcaatttttgatttaattaaaactgcttcttgaccgattttattaaatgcatcagtcgggtcttcgtctaaaacaatattaactaatctttcattagcttcttctatttccgattttagcgttctagcttcttttgccaaatcatcatacatattttgcagacgagtaagattgtcacccgttaattttttctggcgttcaacgttatcattatatattttaatttgttggataatactatcttttttaacatcaagcacttggttttgtgaatttaattcacgtattagtgctttattaagcttatccatttcagctaatgttcctacctcaagcaggtcttccacaagctttcttcgcgcaggggtcgacaaacccatgaaaggggtataccctgctgtaccaaggacaacaatctgcttgaaactggcatatgacattccgataagctgttcaaattctgcttggaaatctttactgctggcagattcattaagacgtgtaccgttaacggtaatttcgaaaacgtttggtttttgtcctcttttgatatagtactttttctcatcatattccatccacagttcaactaaaagttctttcttatttgtgctgtttattaattgacctttctttacatcacgaaatggcttaccaaaaagcccaaatgtgatggcttctagcatagtagacttaccaccgccatttcgtccagtaataagagttttttgaaccttatctaattgaatgtcaataggatttccacctactgacattatattttgatacctaactcggtttagtttaaaattcttcacaaaagattccttttaatgtatcttttagaccattctatcatatcatcataatctaaaaagtattcatcaaattcagccatgcaaacaacaccttgtgctgcttttgatgtgatataaattattccaacatatctagaatcttcttcggtataatcaatatttgctatgaattcatcattaatgtcaaatgtcgaaaacttcacagtatgcatccttaatacaagatacagccatatctcgtaatgatttaggtgtgtcattatctaaaatgttgaagttaaaagatacagcccagtcagtgcagactgtaacctttttaatacaattatcttcaacctctagcggttcaaaccaatattcaataatttctttatgaccaatatcatcttttacttcgcattcaaaatgctgactcatcataacatttttaaattcatcaaaagtcattgtgttgcctctacatatagctgattcgcatattgaataagtgcttcacggtcagaatcagtgatgtctggaattgcattaatgtattcttccatcaacgtctgaagagattgaacttcaacttcttcactttcatctgactcgacagagttatcaatttttgacacaactcgtaatgaatgcacaactttttctagttcagattcgaacttcgtcagatttttgtctacctcagttactataacacgtactgatagatttgtaaaatctttatagtcaatttttcctttaaatggataatgaattctacgatgccaggtagtattgtttggaataaattccattcgttctgtttctgtatcaaacatccagaacccacgagggtcattctcgtcacctgcagttagtgtccatggtgtcccaatatatctgacgttagcagcctcagagatagtatggaagtgaccagaccacacttccttataagtcttaaggaaatcaggttcaagaccgtgagatttcattcctttataaaaataaaatccgttcagttcccagtgaccaatgcaaaaagaagcagatgaagttttgatgtgttcaagaatttcaccagtattttcttcacacatccaaggaattaaatcaattaaacatccgtcaaaatctactgtagtaggcttatcatatactttaacattaggatatttagccaaaagctcagtagaggcatttggagttaaagtatttttaaagtgcatatcatggtttcctacaacagtatgtagggtaataccagcatcatcaagcatttgaactatttcacgagcgaactccatagttttatgcgtgattgcttttcgcacatcaaaaatatcgccgtattgaatccatgtagtaattccatttttcttagaatattctattgcttgtttaattccatccaactgaatggattgaacccactcatcatcggctttaacgcctaaatgccaatcacctaaatttaaaattttcatatatcaagaaccgtcattgaaatgcaaaataaaattattgaaataaacccatctggcgtgctaaagaacccaatccaacatgctctagtgaatagataaaatgcaagaaaaagtatcacatatccaagaaatatcattatatcaaactccgtataaagctaaagggccgaagccctttattttgtaataatgtcaaactgttctttaaagcagaagcttgaatcttgatgctgatacaaaaattcataagctttttcgcgttcgcggtcataaagagttcgatcagatgacagttctttaatacgttcaaatgttgattccatgtcattttcatcaaaccaaatgataccgctatcatgcgaggtcaaaggagtattatcaacacggaattttaaattttcgccagtagatttccaaaataccggaattgttccacatgcaccaagctcgagatgagtatattctaaagaacgttgtagatattttttatccaacttactcaactgataaccaaaaccggatttactcatacgttcaagcatttcgctatttacataacggtcaagaatttgcgttggcaaattaggagcaattttaatttggtctacttgatgaagacgataatactcgtatggaattcctttttctttaataggaatgaacgctggagaacgttccagaccttccataatagtacttagtcctgcaggtttaagatgtttttcatgaaaatcaaacatctgataaaaacctttccatgtggtcgtacgaccaatccaacggttgatattcatgttaatttcagaaacatctttccagtaggttgaccgaaccttcgcaatatccataggaggctgaaagttatatactgtcggtgcttcttcaatatcatcaaacagagaaactgtttcaggataccattctttcatcagaactttattaaaatcaccattatcagaatggctaaaaataacatcagctcgacgaacagtttcttctaatcccaaatttcggcgcaaagaaagagaagaatggtcatgttgataaactacaacacgaacagaaggtttaatgttatcaataatttttttatagttattaatagtgtcttcttcaaccgaagtagcaggaactgaattgataattagaatatcacaatcatttaccagcttaagtgttttatcatattcttttgccaataaaaccggaattgaaaatgatttataatcatgcgcgcaattacgagtaaatgatttatctttagcataaaccaaagttacttcatgaccattcttaataaaccaatcacgttgctcaagagaaaatttagttacaccacaaccttcaagacctcgagccataaaaatacatactttcatttaatatcctctttgttttggtttattttaccaaaaatttataaagcaatataggagccgaagctcctatccacataatacgccatacagaggctcgttagaacttttaaattttatgcgcttatattttatagttccttctgctttagctttatcatgagactctttaaagcgtctcatcatttcctctttagaggaacgaattttattataatctatttcagaagtctgggtgttcatctttcacagttgccaccattttttgacttgataggaatcaacccacactttcatattagggtctgctcttacaataggaggattaacttctttaattgaactatcatggtattctttttcagaaattttcacgcaaagatgaccattcaaagattcagtaaatcctgcattaattttaagacgcttgaattttacgtgtgtaagcatcaatcatatcctcaatctgcgatctagtagtcttccaaagaatactaatgagttcatcgttatatggctgttttagaatatcccgacttttcttgatagcatattcgtattgagcgaaattattgttttcagctgcaatctgagcgtgcttataaagacggttcagttcgcgtttgtttttagacaataacttatttgcttttctttctgcttcaagacggttcttttcttcaatagaagaaataagcttttccacttcatcattaatttcgggtttatcagtcatattatttctctaatataaaataaaaatcatcatctgttaaatgataccgatagtttaattctacaccattagatttaaaagcggtatcatacggattttctggatcaatatcaatgtcaagagctaaaacttccctgagatacattttaagtaaatagggaatagcttcaacttcaggtatttcttccaagaatccggagaggttaatcgttagcctcatataaaaaatccaaactaggagaatcgtctacaacacttttcttttcagcccccggtgttctataggttgattcttcgtaatgcgtcattttatcgtagatgtcttgaataaaagtttcatctactaacgcaaccatatcgtcgtcacgactgtcatagacattgtgaacgaagtaactgtatttctttgcaacttccttacgttcttttttaatacgttggacgaatgcattaaaacaagcttgagttatatatgcatgtgggtttttatatttcgtttcatcaaaattatgaagccccttaatagaagcttctataccatctgcaatcatttcttgtttccaagactgggtgtatcctgaaaagttgaaacgtttagataagccttctgcaataagcataatggctaatccgatagtatcattctgacgaactactttatttgggtctttattatttgctaattctgttttccaatcaataatagcttgtaaaagctctttattgtttacgtaattatatttaggcttagtttctgacattttcacctcttagctcaattcatagatctattatatcataatatttgaagatctatcttaaagcatagaggatatcagttatctaagtaaacaatatgcttggaatactttctccatcatctttttaaattcatgaatatctatataatgactagttaaatcagcatgatataaaaagtctaaaaacttttcatgtgtgctaacgtattcactttcatttaattcagaaacatgactttcccaatatccaacaccagtcttatttgggaaaaatgaaattttcatgtattggtcaacatagaaaatgccataattttcaatagtaatagaaatattaataaatttcatacattcatcaacttagccgcttcaagagctgcatctagtgaatcaaattgatcaacatattcaatcaattcgccgtaattggcatataaccaccattggctaaattcatactcaaggatgaatccgtttccttcaatttgagttaaaccaatgccatttgtatttacttcatacccagcaagacgtaaatcgttaataagagcttcgttcataattataccttagtaattttcaggtctgcaaattttttcttgcgttgatttttcatacgacgaatagttttatcggaaatttcatgcttttgataagctttagattctacaccaaaagctttaacatcaaattctgacaagatatattgaaccaacaattcacggacagtattgcgtccaatcttctgatcattctgtttcatcgtctgatgaagctctttttcccatttatccaaaatttgaggagttacaatatcgcctttttctagcagagaaactactttatcatatgcgtaagaattgatggcgtttttaatttgaatagtcatacattatcctcaattgcattaaaattttattatccaaaaagggccgaagcccttagctaaactttttggcacccttccagccttcgtacatcattgcgactgacaatgacaaggctccttcgcatgctgcatacttattattccagaaccaatttagaaaaacttcgtcctcaataccattgtgtttcatgttctggaaaaatttggcgcgttcttcacgaagcttttgcgataacatagattcaggattcatttaaattttccaattaccgttttcatcaatgaatttaatccagtcatttactgaccacttagttgtatcaccttttggattaacatttaaagtgtatagcccttgcttaaaaagcattcgtttgatattcataatttcctcagctataacgataacactcgtttgatttacgtttagcaactcgttgagaagtattataatcaaaatcatcgtcaatgtaaactgattttttcaactttcttacttcaccacgtaattggcgatttagctcatctttaacttctgaatcaatacctttcattctacgccatttatctgagcgaaaaatgttttcaaccatatctttatgacttacaccgtctggagctttacgctttccaaaatagtcataatcacgcacttttaagtctttacgacgatacgttttacccatggagtttaatttccttcgcaactgaactaaatacagcacgatcgcaaatcatgcgtttatgtaacttgagtataatatagcaaacttcaaaactatttacatgagtaacacgaacagcattaccattaatgagataatactgtccctttttaatttctttatcaaccataaccatatcaattcctcaaaggtaattcatatgttaataataccacagtttgagctcgttgtaaacaactttgtgaaaattattttagggaatgataagaagggaacgatagcttagaatggtaatatacagaatgtaagaaagaaaggcccagagggcccgccttagtcttctatgatatctctatcatatccaagtgaaatgagagtttctttgaagtgtttaatgttcttttgtctagaatcattgatgaaaatgactggataacgaatgttaagagatgtgaatccagcgcgtttagcaagagatacaatcagtggacgatcatactcaatcttaccattatttgtaagaactttatagaaagtaaaaggagcattaagctcctttagaagttttgtaactgattgacatccaggacaacgacctacttcatctggaattccatagacttcaatcttattctttaagttcgagttttgttccacgagaaataattccttgataagcccagtatggcgggttaacagaatcatcgccagaattttcttcaggaaaataaacctggataacaaatccagatgcattaaaggtaaaataaaccgtaggtaattcacctaacaattcagcgcggttattaatttcttcaagttctcgttctcgtccagcccaaaaactaggatttagactacattcatagaaataatagtcattaccgaacatatcaaaacccttccaactctctaccacatatcgctcaaaactaatcataattaggcctttttatcaagaacagcattcagtttgttagtaattttatccagacgctcattgaactcgctagaagataagcctttttctggagaaattaagctaatcacgaaaaatatagcaataaaaggaataagaaaaatagcaccaactgccataaacaaaaagaacgttacagttgtaagaaaatcagctaaacctttacgaaatttatacatattttacccttaattgattaaccaagcattgataagcactaaactatattgcgaataaaattctggaccaaaatgaaaaatcatatcatttatagtatccataatgtaattcaatttaatcatgtgtccacaccccatcggtatttgaccaaagtcgctgattatctgatcctcgccacagctttttggtcggaagatttttctcatacttcccatcaataataacatcaacatatttaagcatttctagttgtttaatatcttcaaacttatatcctgtccacaaccaaatgcttttattgggataaagatttttaatagtttgaaccacagagtgaatcacgtctctgttatcaggatagagagggtcacctccggttatagtcaatccttctatataatcattattcaaacattcaattaattgttctagtgtttcaccagtgaatggaacaccatttctagcattccatgttgatttattataacacccttcacatttatgcaaacaacctgtaacgaaaagaacggtcctgcagccaggaccattaacaaaatcgcaaggataaaatctatcataattcattggtgcttaaccctatgcatgatttctttatttttgccgagattaaatccgcgttcgttcggatttcccaaataaccacatgttcttcttattgtgttcatctttttaggatcagtttctccacaaatagaacaaacaaatccgttttcagtaggagtcatttcatgggtacttccacatgtaaaacatttatctactggcgtattaacaccaaaataatctaaatgttgtgcagcataatcccagacagcctcaagaccttttaggttatttttcatatcaggaagttcaacataagaaatgtgaccacctgtcgcaatgaaatgatatggggcttcgcgagaaatcttttcaaacggagtaatattttcttctactgaaacatggaaactgttagtgtaccatcctttatcggtaacatcttttacacttccatatttttctgtatcaagtttacagaagcgataacaaaggttttcagcaggagtcgaatacaaactaaaagcaaacccagttctttcagcccactgtttaagacgagcattcattttagttaaaatttcttgtccaatatcacgaccgacaagaatattcaattcatgaataccaatgtatcctaaagacactgaacttctaccgtttttaaataactcaattatgtcgtcatcaggtttaagacgaaccccgaatgcaccttcttggtaaagaataggagcaacagtcgctttaactccttttaaggaactaattctacacatcaaagcttcaaaacataaatccattcgctcattgaacaattcagtaaatttctgttcattgaactgtgttccaatataagaatccaacgcaatacgaggaagattcagtgttacaacaccaagattattacgtccatcaagaatttcattaccggttgaatctttccacgcactcaagaaactgcggcaacccattggagaaacaggaatagatgagccggtgatagctttattgttcttagctgaaataatatcaggatacatccttttgcttgcacactctagagcaagctgcttaatatcatagttcggatcgtctttataaagattaacaccttcttcaacgaacataacaagcttagggaaaataggagttatcccatcacgaccgaggcctttaatacgatttttcagaattgctttctgaatcattcgttcagtccagtcagttcccgtaccaaatgtaattgttacaaaaggagtctgtccgtttgaactaaagagagtatttacttcatattcataagcttggaatgcatcgtatacatctttttctgttttagattgagcataatttaacgcatcagcgatttgccatttttctgcatcctcaatatgttttgcataggtgcgtttaacataaggagaaagtactttatctacattcgcaaaagtcgttccgccgtattggtgagaagcaacttgcgcagtaatttgtgccataattgcagtagcaactccaattgatttaggagtttcaatctgtgcattacctagcttaaatccgttttcaagcattccttttaaatctactaaacaacaattagtaaatggaagagcaggggaataatcaatatcatggaaatgaataattccgctttcatgcgctttcataataaaagacgggaccatatttttggcaatgtgtttagacacaataccagccataaggtcccgttgagttggaaaaacacgagaatctttattagcattctcgtttaaaaggtctttattagttttatgaatcaatccttcaatttctttttcaattgtcattttaaactctttctaagctgcttcttaaatgaagctattaattgtgttttagtgtcagattcattatattcaaatcctctttgaagcatctcagccatcatttcctcttttcctaaacgagaaaattcctttgatttatctccaacaaagttagggtgaatattattttgggtgtaatcggattttaaataagtaagtaaattttctaaccattcaagataatcaacaccttgcccctttaagccagaacgattaaatttatgtttcatttgaccttctgcggcattgcagagattacaaagcaatccacgtacctttcctgcttttggtccatttaattcatggtcatgatcaagatgattagcttgaacatcaggatttagttctcgttggcaaattaagcatttaccgttttgtgcatcataaaatttctgtttttcttctttgtataatttgccagtcaataacataataaacccttaccttaaatagataagggtatttattattttcaagtattgtaaaacatttgattcaatcgcttatattgccgaatcttttggtcagaaaaagaaatttgggtttcaagccattcaatatattctgccgcagcttgcatcaaatttccttcatagccatcgttattttcttgtgcagctaatttagctaatgcatatgaaatacgttcaccttgaaaatcggctttaggcttctgaacaacttgattagttcgctctacaacttcttcaatttcgccattttctactgattcagtattccacaagcaccaatacgtaattggcttatcgtagatgttaataatctttccatcagaaagttcaatttcaataattccagtatcaggctctatatcatcttcacattcttttgcaagttcacgaactttaaagacagtacctgcactaagttccggccagtaattacacagccctgtatcagcacgattaattctaaaccacttatctactgtaatcatgtcccatctccatatcaattaagtcatttatcgttggttcattatatattgtttcttcatcagtgtaaaccggttcttccggctctggctctacagtttcccatctagccgcccaccaaggttttatagcgtaatccattctcgtactgtctgagttactacacgttcatggggctcgactagttcaacagtcggaactgcataataccagtcagaatgataagaacctgaccgagattcatttacagccacatgtacattatgttttggactaaagtaaacacactgacgatattgacatttaccatcttgcacccagtcttctatttcgacaggtttaagataatcggaaaaatcgaaatcatagttttccgaaaatgcatcatggtcttcaatgatttcgctcagaactgcatcaacatctaatttattttcaatagtcatttttcaccaattaatttcgcaatttattaagttcttcatcatcaatccaggattctagtcctgatggcaggtcacattcaatttcccaaagaagttcttcaattttctgaagacgatctagttcttcggctggaatagtaaccattgacggagctcgtgatacattaatatcgtaaatcatatttaccccagtttgaccatgcaatcgccgtatttccacttagaaatagacttttcaccattagaataataaacttcgagtttagcacgattatttttaatttgaataaccttggctgtcatcaaagttccatacccataataaactgcaacttcatcacctacatataccgcgcttccgcggtaatcatgaatatagtcagttccttcgagcatcatttaaaatattctcgcagttggtcaaatccaccaatatgacttccatcaggagcaaatacctgaggcattgtcaagccgatttgagtatcacgacctagtttagtcagaagctcagcgattttctcatcatcaaaaacacctttttccggcataatgttgataaattcaaacggctgtttcttcacagtcaaaagacgttttgcattatcgcaatacacgcatttatgaatgttgctatcataaccatatactttaaacatattattccttaattcctagtacttgtttaaaagtctcgtcgtaatcaagactttggcccgtttgttctttatgtttgtatataatatcacttacttctgatagcatatttttatatgaacgagttaaagcagatttaagcacgctgtatctatcaggaaatttaccgtgttcattataataagctattgctaattcacggactgccttttcagcagcctccatatattctttacgcttggtcatttttaatccaaaatattattaggcattggttgaacactcacaagttctttaaagaactcagtagagtcaggcaatttaaccatttccggagcatgcttactgaatttatgtttacattgacggcatttatattcaagctctggtttacgccagttaatcaactgaacttgttcagtaccgcattcagggcaattaggaacgtttttagaagctctttcacgtcgttcaaccatagccataatagcatcccatgctggaggtttaaaatctaaatcgtcgcagccgtgaatctttccacgcatttccatatcatcttcctcaccagccataataattttaattaaactggaattacttgaagctgcaatgtcttctaataaacgctttttcatttcaatacctcaatagcattacgtaaaccatttgcttttgcattaagagcttttaacaatttggtgtgttctgcaatttgggcttcaacttcaatcaaacgggcattgagatattcacgttcttcactcagattatcaaccttttctactttaggctcttttacaactgtcttatatgtattagggttcttcagtttaattagaatgcgtgaactgtataacattgaaccattatcttcggtttcgtcatacatttccactacgtccataatttttaacatcatgcggagtttataagacaacgaacgaatagttttgttgtgcttattaatttctttagctgtcatggtgccaagattacgtgagtaataataaggaacctggatattaattaatactgatgaaccacctggcttgtgtgttacttcatcagcaataacccagtccttaacatgaactgtatttgtacggtcatcgcccgcggtaaatagtttgcgagcatgcttaaaaagcatattcacttggtcattgaattgacaagcaaatttatcagcaaatttagtttcaggaatggtagaaaaccaatcagccaaatgagtctttttaacatcattaacaatagtaaattcaaccaaatcggttatagatgtctcagatttaatgaagctcggcttcataaagtttttaatgttctcatgagctacagtagaagataacatacgagaacgtttaaaccattcaagcaaattgcctaacgaatgagaataagcgttttgagtatctttacagatatgattttcctgaccaacatattgaaggaaatcacgaagaatattattgattactgctctgtgcccgatctgataattacggtgtttagtaataaggctgtcaaaataatcaatataatgtttacgagttttcatgttcttctcacttggttaatgatttatactccgagccatccttggctttaaattacttaattaactgtaaagcttgttcaagacgatccaggcgattaacagattcttcccaaatccttttagcctgctcatattctttctgcgctttattagaaatttctagaacttctttataagctttttctagtgcaataacttctggacgaatttctactggttcaggcgaatcgtcaagacattccattagttcctcaagggtagtttcttctttaggagtattcacaatttcatcacatttttgttggtaaatttctttatcagtcggtgagtacgcacactttacttcacggagactaactacaattttatatccttcccaaccgcatatattcttaaaaggataagtatgaatattttctactgtttccatacaaagtaatgcggtctctaactgacgagttatatcgctagcaattgagaaaaatttattaatgttcttttgattagcttctggtgtaaaaaattcataattcacaaaaatagctgctttatttttatcaagctcatattcttttatgataatcatatcagaagcccaaggatggatttgacgataatcaccatagcataatttagaagctgattttagaatttgcttcttgaaaagtctaaaattactaatccaacgacgagtaaaaatattctcagggtcttctttattattaagatgataagaattaacatcaccgaaccaactgtatcctactacatctttagttcgtttaatttctttcccaaatttaccaagaatatcttgattaactaaatatgaaagaagacgagaacctttaaaagtttccttaatatcatctttatattcgcgactagaaattttatgaacttcatgaataaatttgcttgaagaaacaatacttgcatcaatattattgagccattgattgataatggaaataacactattctgactaaacacaggtttaactttatcatcaataacactattgaatgatttgatatattcgttacgagtcatattaatctcctcagtagaaagtaagaacattataccacatccttgtggcaaagtaaactagttcagtgcatttagtgcattgttcagtttagaacgttgctttgtcagattttgaacccttgactgagcttgttctaacgccttttcagcttctagcatttcattggtcgctttaacgagttcatcatctactgccttaagagacttttcaatcgcatcagcgtgccatttttctacaggtttaaaatttgaattttcagtaggaagaaaactcactttattaagtttacatgcatctatgttacttgaactgtacatccaacatttaggatcgtttgataagtaattggataaatttaaatttaaggtatcttgcacttcctgctttttctcttgaacaatttcatcctttctcaaaaattcatatttaaatgaaacgatcatatcaagttcatatgttgttgtatgttcccaatttcgctcaaaacgaggtaaaatcttagattgaacagcagcaacaacatccatatacttaaatgcttctgtcagctgtgatttaagacattcacaaattgaaagagaatttttagtattaggcttaaagctaattcgtgcagttctattattttcttttaacggtcttacttccatctgaagagtataaccatcaaatttcaggttctttaagttaatgtcagaaccttttaatcgactagccgtcgacaaaatttgctttaattgtctacggaacagagcaataaatctccattcaatgcgataatgatttggattgaaaaatccagatgataaatcgaccttactctgaccaacaccttgaacaaatagaggatttttataatcaatagttttacagaaatcggtgagctgttcacgagcagtcatttgagtaatatacccagcttcattaaaattacgcacccattcactgctgttcagatgtttaaaggcgtgaatggaacaattaactttaccaaggtctaaattattttcgcacaaaaatgtcatagcatcacgagtatagctggcattacgaaccatatcttcaatttgagaacgagttttcatggtgttccttaagatttaagtaaatcgataattttaattaacttttcacgctcagatttagctttactactcagtccagatagtctgaaaatttcatcatcatattgttgaatagaaatattcagctcttcaatttgcttattaaaataatcaatttgttcagaatgtttttcgttactacgaactggtacaggtttcgtaggcaatttagttgaactggattcatccgggcgataaattaaaatacaacttgaaccaatagggcattttgcaccagatgaatattctaatgttccagcttcttttaaaacttcaaaagctaaacagagatgatgccccatattaacataatctgtagagcgagctctgatgtaataatcatcgccacgaatactaaatttaaagcatttaaggtcttctgtattattggtcttaaaaatcatttgtttatctagacctttagctaatcgagcgcctaatgctaataatcgtctttgattttcccacaaatccgcaatcatttgatcgaatgataattttggcattagtcgaccataaaggtcatatcctttattataattacgaaggatttcactcgcattaatacgagacaatgctccaattttattaagggctttcataatgcgattagataaactcattccagatccgtttgttcgctgcaaatgtttttctaatccaaatccaatatcaactttaaacttatctaaaatttctgcatgaacatctctgtcaataacattcaaatccaaagttgggttaaatctatgaaaaaatttatctggctctccacgacgaagtacagtccattcattcaattttttattaactaaagatttaattactgcattgacattattaattactactgacatattttcctcactcaattttaccaattatgcggaataagattgaacagactatataagtaccacatatagattgaactaatgccattccaaagaaccaaacaatattatcaaaccatgtctgttttacgtcgaaaggacgtaaacttacagtaatattatcacctttttctattgaagaatacatctctggggaaatatattcactaaatctataaccatctttgagttcatatacggcaataaacgataaactagacccttttccttgtgttcctgtaatggtattaactacagtaacatcataatctttataatgcatataatcattaattgcgtaataaccatatgcaattactacacataaacaacatatcaataaattcaatcttttaattatcaactgtttcataataatctcaattaaaagggcttagaaccattataccatccttggtataaagcggttatgcgagtaccgtctttaaccgttcttcaaacttccgaagagtattttggcgttcagctctttgctttttgtaagtttcaatacgctctgaaatgagagtgtatcgttcatttactgattctttcataaaatcaggaatttcacgagaagctttaatctcgtcaaatttatcaataacagcttgctcttcagcaattaagttatcatacattaaaatatctttcttgataaactcaatatcttcttgagttacacgagataatttagatgctttatcctttttgtactgttcgttagtatcacgagaccagtgtaatgtacgatttttattcgtatttttgtaaatttctacaataccgatctcatcgataataacgatccaattccaacgggatttgtaaatttgtcctccatcaacagtgatttcacctccgattgagatgtcattaaagaacttgctttgcgcttcagatttaaatttaccatcgttgtaatttactaagttgaaaatatctttagcgttcattttctgttcctccgtagttgatagttgtatagtaccacagaggaacagtcttgtaaaccactaaaagaaacttctttcacaattttttccactgaaccatgcgcttaccgctttcttagtctcaggagcagtgttatccataaaccattcaaaggcagcctttttatgattctggagggcttctcgggctttaatctgctcacggtctattaacactaacatatgagcctttcttgtcaccatgggcttcttatgattttttgaatactcccagtcatttgtccatcgcattgtcgttgcgaacttaaatactgcttctttaattttagtttcgtaaatttcacgagcctttgagtataacatcattacctccattcaccagtttaattctagtcatctttttaatggcagtccatataatctatttctgaactgcctttttgtcatagaagtcctcttatgaattatttcagaagagtaacctcagcaatttcttcccaaccgtttttgtcggtcataataaagtcagcaagataaagagcagtacgcagtgaaacattgcgtaaacgattaacattaactttcatccatgataatgctttataagtttcttcatcagaaagaccgcgcttttgcatcatgtcagttgaaagaataacatcttcaaccctgaccataatttcttcattagtgtgaacacccaaatccaaataaaccgagcgggacactaatgcttgtaaatgtggagcaagtttagtaccacggtctaattcgcggtcaatgtcaacgtttgtgataaaaacaatcgttcctttaaattcaaactcacgctcaatgcctttttcttctaagtaagaagacgcagtgctccagcagactttacgggtctctccggtgtccagagcggcttttagaagattaagaatgtccatatcagagaaaacatccacatcatcaatcaaaaggacagaattctcttcacgattattccaaagctgctcataaagaccaataccagagattttaccattaatgcttttatattcaatgtatccaatatcatttgctttatttaaagctttatctaaagaatacgttttaccaatacctgctgcgccagagataattaatgaacgaatatttccgttaataataccattcgtcatcattcccataacattaaatcttttattaatgcgggttttcatatcttcatatgattctttaacttcttcaacttttacaccatcatatgaaatatctgatttgtaaacccaaacaccgcgacgtttaccgtcaatttcaacaaaaactttaccatctccttgtgcatctaccggagcattatctgggaaccattcgcctaagagctcaaaagttccagagatttctttaccgaagtagatacccttattaatagttacagttttcattttattctccaaatccgtatcagttgatagttgtatagtaccataaagctttatgcttgtaaaccgttttgtgaaaaaattttgaaataaaaaagggagcccgaaggctccctatcatttataataacttcggtggttttcaagataaaccctctcaaggaagtcatcccagaaacccatgtctactttttgctgcataccgttcttagaagcttcaatggatgctgcttctacttgatcaaccacatcttccaaaaactcttgaacagttttaaatggatgtttacccaacttcacgtcgagaataaatggagcgtcttgaagtggatagactaagtcaccagttttgtaaatttccaatagttggagtccaccacgacaagcatgactcagagctttccagtcaatgccttcattagcttcggctttacgagcacgttcaccatattcagcatctaatttattcagtgactgcttaagctcaataagagaaagtgttgtctgatatttacgacccaacacagtgtagaacgtttgcgggcctgttttctcgtgattatggaacacccattcacagaattcgttttctggaagacgatgcttaatatcttcaactttagtgcgacgctgcttaatagaaccatcttcttggtaatcaacccattgctcggggatttgattaactactttcaatacatcacgtaatgcagccaaacgagaacccttgacaccgtatttagaagcttgcttgcgaacatatcctaaataggatttcatgttagtcgtataaaaacgagaacggttgtcttgaataaacttccacacatcaggcaaatcagatttaaccactagttcagatggagtgtgaagcatatccaatgctacagtttcaccatctgctgctaatttaaagaaatatttaagactgtatagttcatggtcaatatcatctttagtgtttttagatgatgtgttgttagtgtttttactcatgtgctctttaacatttccaataagaatatcacgagcaggaggaacaaagatttctttaaaatctacatcagattctggggtagaagttccataaagatgactaccaaaatagcttttcattactgttttcatcattcagccttatattcaataacaggacatactttagctttacgagcttttaaaaattcaacgataaccgatttctttggttgaataggaggtaaacctttatacgccctatcaatattttctacgtgtaaagcataatcctttttccatttataatctttatatttttcacgcaaatgtgcaggaataacaaatgaaccaataataagtaaaataagcaaaatggcaagtataaatgctgatggaataagagtccataaactaccaaaaataagccatttctgtatgatttctgcacagataatagttagacctgcgagtatagtacatccgaaaaaagaaacgaaaaatgtagggataacaatagaccaaaagtatgcacacagtgtcttaggtcgtttccattcgtcgttaaacagtttgaataatttatagtgccaagagttttcattaataatcataattatcctttcattgaaggtgtaacagttgttaaataattaatcatagcttcagcttctgattttgataatgaaatttcttcattgttttgacgaatagaaataaaatccggatgacggtcaccaccagcttttaaaacacacatataagtatcagtttcatcttcaatatctgaaatgattgaagcagttccacatgaatgtggtttttgataaatcaatacagcttttcttccaccgtttgactgttcataaacttttaacacatcaaacaaatcgcttcttttatcaatagctaagatgttgttttcatcttcaatattaaatccttcggatacttcataaagtgtcacccataaatcaccaatatcaataacagtgttcacttttccatgactttcaagagcattacaaattttcttaatttcatcataactcattttaataatatcatctccttgaataaggaagatgtcatttttaaattcaacacgaattaaaccacttccacttgaaataaacatatttcctcactttgaaatcatagttggaatgacagaatcgagataagtctttagcgcaatagcttcgtctttggtaaatgtgacaatatacgatcgaaaatcatcaatttgacgaatagttaagacatcaccatcttcatagcattttgatacgtttaaaacagtttcatcattctgattgcaagcgttagtaataatagcattgcaatttttgagccattttaaactatgttttctttcattagaataataaaaatatttaatcttatctataaaactatcccaatggataactgataaacacattgactcacttttaatattaaatcctgggcatgaagaataaaaatgaattttgtgctcatcattgatgcttactattttatcagtataaggatattcaatttgggttaaatgaatgatttcactaggcgtaaaatatagcatatcgtcttcttgtgtcaaacgatacatattatttactttttctatagctaattcaccaaaaagcggactaacttctaatactaatcgtttcatattgattctcttcgactcacccacaattacatactcctttgaataatatcaataatgttgttcaccagattataagtaaacattggataattatattgaatcatcacatacacaacaaacaaaactttcattctcttctccttggcagttgacaagattactatatcataaccttgccaacttgtaaaccattaaatgacgttttcaataaaattctgaagctttgtgtgagcatcaaccatgattttcatttcttcctttgcgaaagctgtacctctttccctagcagaatactcatagtcagaaactgcattagcatattcttcaattagcttcattaaaaacatctgcttttcagttttcattattccacctaatcatttcaagatattgaactaacttagctttggatttatccaaatcctttttagctgcttctataccatcgtatgagtatccttcacaatgctcaactgctaattgatatgaatctatttcaacatcacgtgctaatttaataattttttcaaactgttcacgtgttagcatacttaaactctcgtattatgatcgataatttcatcaagaaacatatctaaagcttctacagcattatcaactttagcttcaaatttttcaatacctttatttgcaatgcctgccgaaaaccaagcaaagtcactaagttcctcatctgctttgcgaattaaagctaccaattctttaattttatctgcttgttcaattctagtcattattccaccacatatgaaagagagaatattgcacacgccatatgagttgcagcttcatcacacatatcataacgtttcttaagaagttctacaagttcttcactagtaacttcatccatgtcgacgaaaaaatcaccattaatgatgacgtagatatttccttcttgattgagtgcttcaattttcatgatgttctcctctttatccgatggttgtatagtatcacagctcaaattgaaagtaaactggtaaaatgaaaaaagtctcccgaaggagactaatgttattcgagggaaagaagatatttgctctggtaaaacatcccagtaatatcatctatcgtgctttgaatggctggaggcatttctttataaatgctgttagattggtctagtatgtgatcaatcattctaattgtgtcggtaggaagtttactggcatctggaatagaaggcgtgtattttctaccagaataccccaaatattgctcaccaaatttatcaatcaaatctggcaactcagagaaaataaaatcgtatgctttgtgtctagcataacttttagtttcaaaatgcgcagaatgaaaataagcttgtgcagccattaataaacctaagtattcatctgcctttgaaggttttccactttgtgaaaagtcgctgaatttcattcagtctccaatttaatgttcataattctagcgtatgattgtgccatctccgcgcctcgctctatacattcaaaatcggaagagcacgggtcatttttataagtcgttcgcataaaactatagaactgttcagatgattctacgcttttattttcaaaaagcatataaacgtgtctaataccagattccataaatttatcaaaatgaggatcgacattcgcttcaattggtggagataaagcaaacgctaatcctagcatggcaaatagtgccgttgcttttaaggccataaaggcctcctatcatttttgtcctgtatttactttatgccgatgcacggccttaactttatcaaggtatttttcaaaatttcgcaatctagtatagtctgccggagattggttgagtgatacttctcgacgcaaagctgaaatgatatttccaacttccctacgaatttcatctaattgaagaacagtaagattgcgaagttgcttttcagttaattgtagcatatatacccctttagttagataaacctatttataacttttgcactaaccgagctttttagttaattcattccaatgttttctacacaaagaaacataaatttcatcaccaatacagatttgattaccttctttaactggtgttccatcttccattaatcgagctgtcataatagcttttttaccacaatgacaaactgcctttagttcaataagtttatctgcaatcgccaaaagttctttagaaccttcaaataattttccagcgaaatcagtccttagcccataagccataacaggaacattatatgtatcaacaattcgacttaattgatgcacctgttcagtttttaaaaactgagcttcatctacaaatacacaatgaatatctttttgtgcttcagcccatttatagaactcaaaaatatccatatcatccgtaataatattcgcttcctgcttaattccaatgcgagaaacgacttcacagacagaatcacgagtatcaatagcaggcttaagaactaatacacccattccgcgttctttataattatgtgcagcagtcaaaagagaagcagattttccagcattcattgctgcgtaagtaaaaattaaactcgccatatcaccttcttaaagcgtattcacataagctattaattcgttttctttcttatcaaaccgatcagcaaattcttcttgctgatcgggagatagcgggccgtattcatcataaaaggtgtttgcttctgtatgctcatctagaagttcatggataagctcaaacaatttatctttttgttctttactcagactcatatattaatttccaggagttttaaaataattcgcttttgcttaaatatttccatagttaaatgaccagtatctttttgaccgattccaatggcaaaacctttattgacagcgagttcaattaaattatcaagctcacgtaacacttcatattgtaactcaaaactattcatttcggtttaccttctttaacgaaatcaggataaggataaaatcctgaataaaatccttcacctttatgattgatgcatcctttattagaacaatagcaccaataatcgaaatcacaagccatttcatcattacataaagcaaaaacaactggccattcacacttttcgcagtgggcatttttaagaatactagtttggctcataaccatgtaacctttaaacaatattcttctacatgttgtttacgacctttcctatcaataaaggtatattcaacgaatgttccaatatagtctttatctacatcatgtggactattaattgggcatttagtacggcaaatgcgttcccattgacgaataatttccactttgtttttaggatcaaacggatgcgggtaatgtactttcataatccaccactattaaatcaatatcaggagtaaacatgtcgattaatttagaaaccttatcccaatcgccgccagcaataccgcaacctatgcgtggaatgtaaattactggtttaaacaaaagggtttctgcctgtagatttaattctatcatgcagtttactaaagcaccataatcaagattaggacccggttcgtattgtgtatacaggttatagcatataccaaatcccgtaggactatgtttaaaaacaatagacatatcgcctaatttatcacgagaaccgtactcggtagtggttttatctatttctaaaattttgggataggctcttgctaattgacccgctacgccagagcccattgtgtggaagcaattgcacccgtgcgcaataatattaccttgaagaaatagggcgacaatatcgcccttgatatattttacaatcatctagtactcaatcctcgattataagaatctactaaacggtcaaccattgaatgacaagcggctttatctttctcctccgcaactgaacattctaaagtattccactttttagcatatcgttttaacaatgtatcatttttatatctgcttgatttatctctttctccgtctttatatgcatatattaatttctgcgcaaattcagcttggcatgctttatttttcccacaataatccgcggcagtacggtttacatactctctaatttcagtatatgatgtatctgctaacacagaaaatgaaattaatcctatacataaaaccaaaattttagtcatttactatttccaaaagtttattatttttaaggtaattagccttttctaggacttcagaagcatatttagaacctgctttaacattccatcccgaattataagaggatatcgcctttcttatatcgcccttatgtatatttaaccaataagaaagttcaatgtacgcccaggaagctgaattggaccgtttattcaacattctttttatttcagcatcggtcatattataaccaagttccttaactcttgctcgcatagtaggcaaataattttggaacattccataggcatgatgctttggtttagattttaaattaactccggcagagctttcttgccataaaatagcagccattatatgacctaatccgctcttgtggatatttttgtgtgttttatattttccatccttagaaaattgttccccgaattgatacgcgtaacgcatgttatcgagttggacattactgaaagtatgctcggagctatgtgccatcattgaaatggccaatagaccagcgagtagtgcttttctcatgcttacctcattgagttttaattactgctttagaagcctttcctggtaaacgacgactgttgataattgccatcctacattgaagtgacgggtctttgaacttcgcgttaggtttacaaactgtaaatccaagccaaagatttccatctgtgatttctaaacgtccaggacgatattcaaccccatcaataaaatcctcgtcaatgtcaggacgcggaggcatactcaggaattcattaacttctaaaacatggtcttttattttatggaataattcaaaaacatatgtctcatcaatctcccgttgaattgcacgatcaagaagatgttgagaatattttagatgaaacgatgagactcctgctgcttttgatgcctcacgaatctcattgttaatttgacgaaactccgactcaaagtgacgacgaagcttatttcgacggataaaaacttctgtattgatagtcatgttattctcctcttaactgatagaaaaattataccacagtcaagaggaaaagtaaacagttattctttaaatctaatcaatttattcatagactttgaaacttctgcacgaacctcatgtagatttttgagctgttcaagacgctgctcatagtaagcaatttcatcttcttcgagacagtcctgtgaatcttctttaagataacgtgcatagtcctggaaagcgttacgaactacttcctggaagtcatcaagactttgaattttcttaggagcaacagatacacgacgaggggcagtataatactcataaccaaaccctgcgcttaattgagccattagtatttttcctctggttggaacactgcacgacaagcccacatactggcttctttgagtttcgttttagcaatagttaactgatcgaggctttcagcataattcttcgcgagttcatagtcttcacagctatcaaatgcttcccaaaattcatcgtataaagcatcaaagataagtcctaaacgaacttcagcgtctttgatagcattcactttaccgattttctcttcagtatgcggcttataacctttaatgtcttcaatcatatttgacttcctcaccagtacataaatcatattcaactaaacgaataggttcatgaatgccatatccttgaacagaaatttctgtcgtaggataaattccatcaatatcacccatattccaggcttcgttaaattgctgttcgcctgaattactaaaccactcggcgaaagcatttagcacatctttagaaccttcaataattatctttgccattacaaactctcagtaaaggtacgagcgataacgtcgcgctgctgttccggagtcagagagttaaagcgaactgcataaccggatacacggatggtcagctgcggatatttttccggatgcttaactgcatcttccagagtttcacgacgcagaacgttaacgttcaggtgttgaccaccttcaattttaactgtaggctgttgctcaatttcaatttcacgggcatgcaaaccatagaaaatttctgggtctacaaaagagtcctctttaaaggttttagagacaataattcgtgcttgaataccatcttcaaaataaatagtacctttatgtgtgccttcaagaatttgatatgctttcatataacctcaattagaaaataaatttatccaagattgttctttaattaaaaatggctcagaatcatatgccattaaactctgtgtgattagtcctttaaaaggcccatcaataaattccatggtaaaatatggaattttattcattagccgtgcattaggagccgtgcacaaaactctgcatcctttgaatacgcctttttgtaatttgtattgcttgggataaaattcgctcaaaatgttattttttgccaaaatttcaaaatgattcaccaatttatttttaatagtttttggcgaaaaataaagatattcgaaaagctgagtgtctgtcatcattgcattccgattacgaaaaactgtggacgagtaataccaccaatgcaacatttaatattacagcagcagtgtacagtgtcaatatggacactataaatcttatccatatcaggagatttgacaggctcatcaattatatacaaaattcgcgaaagcgataaacctctgaacttgcttcctttattaccaataaaactgcgcacagaatcagtaaataaacgaaaacgtatatcatcattagaataacgcgaaaattcctttttaatattatctgcggaaattttagcgtaagctgaagtattagaaagaacaataactgttccaccgtcatacaaccaattagcggcaaaattagttactgcagttgatttaccagattgacgcccaccatctagtcgaagtgtacaatactgtttaagtaagtcttcaaatggcgggatatattcgtttttacaaatttcttctactctagcatcagaatggtgtgtaaaagcattcatcagggatagataaggaccagttaaaaatgttctcattttgttctctctaggtttgggccattccatggcgcatgaattgtccatttctgtatttacccattaccgcacttgggctcgaccttattacaggttggcgggaatccctcacagaatcatgaggtccaggttattcccatgttatttaaatgtaaatatttttgccgtaatacttataccagtgtggcttcattaaaattttttcatcgagtcgttgttgactcaacttaatagctgatttgcatggattataatcatttttccattctactggaatatcgctgatgtcaggaacttcagtatcttttatactgaacccgcgttttaagcattccgttataatgtccgattgacgctttcgcaaaaattctaacttatcgtaaaagaaagtaacatgaccagaacctaaaataaatttagaagatattttaaaatctttaacgcgcttaccgtttgccacatgcttacgaactataccaaaaacacgcggcaattcacggtattctgcgattaaatgttgatcagcaagttcagatactaaagtcaaattaatacgagtcattttatccctccaagtaactgtgaatatactatcacaattctaggagaaagtaaacaactttatagatttttatacgcgtcccaagtgccagttctaaacgttgcaatgactcgttttgcgcgattaggtgtttgattataccatctacttttagctaagttaactgctgcttcatcccagcgtttttgctggagcatgcgtaaagaattagtaaatcctgctacgccggtttcccccatttggaagaccatgttaatcaatgcacagcggcgaacagcatcaagagaatcataaactggttttaatttagcatttctcagaattccgcgaacagcagcatcaacatcctgattaaagagtttttcggcctcatcttttgtaattacaccattacaattacgcccaatagctttatctaattcagatttagcaacacttagtgatggacttttagtaagcaaatgaccaatgccaatagtgtaatagccttctgtgtctttatagattttgagtctaagaccttcatctatacgtaacatttcaaatatattcataatacctcctaagtatttatagaaggtatttataaattaaaagaggctgttcattattcggtaaagtgaaggacccatcacatattgccactgagtacgaggaataagagcaaaagcatccatctctggaatcataacgccatctttattttcaaaataagactcgcaatggcaatttctaaacatctcatgctctactggaatcgtataataaaataactgtaagtctttattactagaatatttaaatacacctaagtcttctagaaggtctggattataatcgataaaaccagtctcttctgagcattctctttttgcagcttccagtgcattcaaatcagaactttctacacgcccctttggaatatcccagcgatgtgcaatcattccaggtttacgagaaccggtaactcgtcccataaataaatctttatcttctgtcataaagataataccagctgataatgttttcattttaatttcctgcattcagtgataaaattatttaatttttgagcatatttcttttcatcaaaaatcttttgctgtctgcgtagccgccatggcatttcaatgaacacgcaccatatcccagataatattgctgctgtaaaaatattaacaagtatggttaaaagaatccaatctcctattctgtccattggattttttataaaaaagtaaaatacgaatgatgtcacaggaagactaataatataccacagaatcataattttatctgtgaaccaatcagcgttcgttaacttagcacgaccattatgaatacacacgaatttatcatctgttataatagatggcttagctgcttgatatcccattctaaactccctaatcaacaaatttttcatatcttcggaacaaccattccagtcaactctatcaactgaaatgccatcatccccatcatctaaatcataccagcgagtttttaaaatcatttaattttcctacaatcactcacaaactcttccattgattctttttcaatataagacatgtagctattatattcctttaattgtattttgtaatccttttttctttgccaatttattttaaaattatcataatgaaaatataacattgtaccaaagaatgaaaataatgaaataattttagtatagtgaagttcactccaaacttctattatatttactgtgccgtcaatgtttaaaataagacagtcaattaacaatccaaaaagactacccgcaagagctgcagccaacgctacagcaaaaattaaaaatgactcaggaagagaatatttgactttatttagttttggcttttgcatcgtgattccttaacaaatttcataatttcatcaaattcatgcgcagcaagtttaagctgatgttcctttttaatctttttacactgagctttccaatcacgtacacgtttacgatagtgtcttccttgataccaatatcctatccaatttataggtactaataaaagcggaactaccaatggaagaattagtgttgctccaaatattgcaccagattcaatatcagtcataacgtctataactattccagcaatcaacagaatcacaaatgatacggctaccacaggacctattaacacatcagtagaaattatctgacgctttaattcatactttaagggtttacttggaagatacattgatggctttgacatattctctgcattccttcacaaatttttctaataataaatcgctttcaaaattgggattttctacgaatttatcaaaaagatcatcgacaatagttaagatattctttttactaagaatacgtttattttcatattttgtttcagagtcaactataagagtaaagaaatatttcttgccctgaaattttacagtagtatcaatatagaataaatttgacctttgtaaattacgtttaaaccatgcatcacttaaactataaacgccaagataatcataatcgtcgtttaaataacagaccgtccattcaggagaaacaaaatcagtaaattcaacgtcaaaatcgcatgttaataaatgaattgattcaatactgttaataagtattccaggacgtattaaagactttttacctctagaaaatcttccagaaagattttcaacagtttcatatgaagaaccccaataataattacgtccttctgccatacgtttaagagcatttaataattggtctggaacatcaacctgtctttggaactcttcaaacattgaattgaaatcactttgcattttcattcctacttactccaagtaataggggccgaagccccttatcattatttcagagaattaatatattcctgaacatcggcagaggtagtttcaaccccagaaatattaccattaaaggtttcaactcgagcaagagtatcttcaatatcaaccttagtcagtgctgcaatttcaactacatcatcagcagtactaattccaagggcattcgcggcgcgagtttcacggatatattccaatttaactgcaagttcttggcgagcatcatctaactcaactactttcttggcgatttcaattcgcatttcagcataaccatcagctttagtagtcaactgctcagctgttcgacgatatagtaaaccaagtttagcatgcattgttacatcttgaccttccgaaaggagcttgcgaatttcacgctcttttgattcggcctgcttattcttttcgacaataagttcacgaatacgcttttcttcattaatagatttaacagaagcagtttttagatctttaattttatcaagcaattttgctgctgcggcagtatactgctcttcaacagatagatttttagccatagcagaaccaagtttagtgcgaataaactcaacaattttcttcagtgtgttcatagtatttccttaggttaattgagatttaaaatccgtaggagtataatactctatcatcaagttacaggctcataatatctcaatcatgagcctatgtaaacttatttcatattattaaaatattcttctgcgatttcgtcgttatcgtggtaaactttagaagacagtttaacataaccttcagcagtgaacatattaatcacaacctttacagtataccactgtccgtcttcattacccattactgcgtaagtttcaaacatcggatggtcaggaccgataactttaatatcattcactgtacgaccaaaatcttctgaaacgcatttcataaagaagttgaacagttcgccgtaattatccatttcattctccaagttgttttctgtatcagtagttgatagttgtatagtaccatggaagaacagggatgtaaacagttttgtgaaaaaatttttagggaattctagggcagggatgggcaattaaaggataggataatatattataaagggtataaactaaatgatgcctagagaggtccagaaaggcctagataccaaaaagccctatcatttagatagggatttaaaattatttacctagtttacttattatagcttctgcagcagcttttagcttagatgcagtgttaatacgatttttaatttcagtatacgcatcgccaagaacatcaaggctatcagaataaacacttacactattgcgttcgctatttgaaatagaacctttagttttgcggtcaaaatcggtgtacacgtcttgaagatcgcgggctgccttctttgcatcatccaatgcatcaagagctttattcaaagcattaacgtattttttagtgtcgaacatattcttagaaattttaacaggtgcgcgttcaggagtagctaacacagatttaggaacctgagcgccagatgccaatttcttagaaattttgaaaaatgctttattgaatttattttcttgactcattgtaaaagaactattatcgatgttgtacatttcaatagctttagctttccacttaagaaaatcgccgcggtcttttgggtccaattggaagaatactttagtaagatctgcttcagatggtaattttgctgcttcggttaaaaattcggcataggttttcatttaaaatccttgaaataatttatcggttggttattaattatttattactttgttactatccgtagcagcattctctatgtgattcaaactaaaaagccccaacctttcggtcggggctaagaatgtcatttgatttgtttagcagaccaaatgcggtctttaataattttttggatgtcttcaacatactcaagagagtgaacatgtggattatctttgaaactataagcacgggctaacttttggccttcggttttgattactaaaagctctttaaggatagcttcatatttagcgataattcctttaacgatatttttttcttgtgccgctttaggatctgctttaggagcaggtttacccgaagcctttgcaaaagcagcgccagtagcaactagacttttccaggccatactaactgcatttcccgtaaatccttctgctttcatgtcgcgagcaaattggaatcgtgattcgtcagaagcatctttataggaatatttacccgctgcaattgctgcttttgcgacagcttgaatttcggtgctagatgcttcatttaacaccgcttcatttaaaaattgagcatatgatttcatcttatttcctgttttaattcgtggttttaatatacttatttatactaaaaagccccaacctttcggtcggggctaagccttgcggcaaccttgtcggggttccacctgctaaggcaagtgtttgtacgaaacgccgggatttgaacccggttattaagcagttgacgctactcaatatttttaaaaggccatatctcgaccatatccgaacgttccgtcaaaaacgctactcggcttacggcaaagatatttcctcgaatcgataattcggtgcgccgtttctgctgtgatgtaagagggcatcaataaacgcaaagattattaacgcaattccttactcagggaacatcagtccgacgacttaccggtagcgacccggtttcttaatattcttttaaagcatcaatatattcacggcgtttacgccataaatcaattgcttcatacgcggattcagcatttcgaattggacggcatttatataaagatttgtgattttgatattgcgtagataacggaattttatctaaaaggtctttacgttcaaagtattcgtaaccatctaagccaaatgaacgatttttgagaaattgccaatgaccaaattcgttttgaatataaatataatccgcgtgttgataaagtaaattaatttcacgaaatgagatatgtttttcatattcattgaagtaaaatgttaaatcatgaactactaaataaacattacctttcatattttcctcacttataattggtcgaggcagtagggatcgaacctacgacccaggacttagaaggtccttgctcttccttctgagctatgccccgtaattggggtgaccgatgggagtcgaacccatgactacgagaatcacaatctcgagttctaccaactgaactacggccacattaatacctactccaacaatcaagatgtcttcacacgaaattaagagaagagtgatcagttcaacccctataatcgcgtcaagtagatattaatgtgacagttgtcacaaatttggcggacgtgataggattcgaacctataaccaatcgcttaacaggcgatcgctctgccattgagctacacatccaaattggtggggagtggtggagtcgaaccacccgagtcgcaatgacaatgaatttacagtccacaccgctacctctacgggataactccccctaattcttaatttggtggccctgggtggaattgaaccaccatctggcgattatgagtcgcttgcttgaaccttccagctacagggccttggtgctgattgacggaatcgaaccgccgaccttctcattacaagtgagttgctctacctactgagctaaatcagcaaaactggcggaggcgataggatttgaacctatgagtcgccggagcgactgccggttttcaagaccggtgcattaaaccactctgccacgcctccagtctccgtggcaggatttgaacctacgacattctgctcccaaagcagacgctctaccaaactgagctacacggagtaaattaaattggagcggataatgagaatcgaactcacatcatcagattggaagtctgaggtaataccattatacgatatccgcaaatttggtgcgagaagtgggactcgaacccacaaggaaatcattccgcagcattttaagtgctgtgcctttaccaatttgaccattctcgcgctgggaataaaggactcgaacctttgcatctagcagtcaaagtgctatgccttaccaacttggctaattcccaattattaacaaaggctctcaaacaagaacccttgatgatagagggtattaatcagtgcggtatgagttaataataacaaataattcttaaagcaaattaaacattttaacggtcggcaaaacaatttcttcttctatataagagtatttaacactctcaactacacgcaaaaaatcataatcataatactcagaagcattacctaaaatattaataagtccttcaagcactttattaccattcacaaagaataagtcaaatacgcgttcttcgtcttcttcggatttattaccaaggtcaacttctatatcaaagacctttttaatgaattctggataaagttgttctgagaacagtccttcaaccaagtattcataaataaaaagagattgctcgctgaacaaaccattaccgcaatagcgctcaattttagtactagaatatctgcttttaaatttctttaaaagatactgaaattgtaagatttcatgctcttctacgccaaacagtgttttagttttatagttgtcaccatcattttcccaggtagtgacatcaattacgtagccctgcggaattgtagtacctaaacaaatattcatttttcaccatgctgcgttaatgtaagtatatttaatacattcaagacccaaaggattcttgaaaatatcatattcaagaagacctttttctgtttcaataaagaaatcaaaatttactgtattaaatttacggtcttccttcactaatttaacttgtgaagatgaacggtcaatgtaaaccttttcaacttcaaaacatgttaaaatgccataatcatcaatcaaggctttagctgcttcttgatcatatttatatccattttcaatggatgatactttagcataaagaatcattatcaaccttcatcaacaacagtatgcgtattggcatttacgatttgccaccaatcaaagcgattagaatccatcggtttgttttcattttctttgataatgtcacggagttcatcttcagagaatgctttagcaattaaatcggtatacccaccacggggataataattatcacctgcaaacaaaaggaaatttaccttcccggaaggaacatacgcttccttaggatacttgtttcctgcgtggtcaaccacttcaatataacggtaaggaatatcggttctttcaacccattgccatgccgctgcaggggaatcgaaagcatctacacctaaacgattatcttcatctttagacggattattttcgtaatccgcatatacataatattcaacgttcattattcacctttagaaattttatccataacaatagcaattaaaccaattaaaaatgctactacaagtgaaaaaacattttctgccgtagtcaataatccgcatataaatccaacaaacattgaaaaactgaaagcggaagcagaaattgcaatagcaacatttcgaattaattcacaacgtttcattttattctcctcagtagttgatagggtaatagtatcactaccccatctaaaagtaaacttattttttacgaaaaattgatttattttctgctgcccatttttcaataactgcagcaggaccagtaacaacaattttatcaccgtaatcttctgcggcgagttgaccgaaattatctaatgcatcacgaagaactccatgaggcatttcacccattttatctttcttgccagtgtaaataaactcaacttttacatcagcagtttcagcaataaattcttggtaagttttcattttgatttccatttggttttgttttgatagggtaatagtatcacaactaaaaccctatgtaaacaactttgtgaaattattttaaatcttctaatcgttttttcatcttagaaccatttttagcaatttctcctgcatcggagcataatgctaaaagtgctttaactttcgtttggtctcctttaaaagatgaaggatctactgcagcagcaagttctttaatacgagagaaaagacgctcagcttcagctaaagccattccaagctttacttccataccgtgggaagattcagtgatagtagtttttgtagtaaactctttgaaagttttcattttattttcctaattaattttgatgagataatagtatcactacctcatcagcatgtaaacaactttgtgaaattattttaaatcatctgcccaatcgagtttaagaggctctttgtattcacgatctaatacgaccggaatttgtacatcaccgctaaatgataagggcccaacattataagacaatgttatatgcggtgtgtaatcatcaaaatcatgtgtagcacctagtgcccgcgcatacatgtgtcgacagcgcagatattcagaatctagcacaagtacaagagtcgatccatcttgtgttttccacacttctaaatgtccagaagaagctacttcaaaacttccactcgatggaacatatggaacatttactcttgaataacatatagtcgaatgaattttttctctaggaactggattaggaacacgtaaagagcgctggagttcttccagcgcgtcaagtgttaattctgaaaacttagctgctacataaagacccgttgaaaagtctttaaattccatcattcttcatctgcagattcagcagtaagattcttgacagcttcaacgatttcttcaactttaatagtatcgccagtgatacctactgcatgagcaatttcagccaaagttccttgcagaattttggattcttccatcagacgagccgcttggtcctgcgtatcaagaatacgagacttcagagttacgatttcagcagacagtttttgttcaatagtttgttcagacattatagtacctttagtgtatttttaattttagaaaaaagttcttcaagagaaccatcgtttgtaattactaaatcgccatcacgaattggcaatccagcttctgtaatatgagtatcattggatttttgaccaggacgaactacatgaattactgtagcacccatcgccctagccgcatccatttcatgatcttgacgagtatcaggaacgatataataatcataacctgagttaaatttatcaagataatctaaagcaaataattttacccaatacatgcggtcgaagttattaacaatcaaatccgtacctagggcttgcatcagacgacggactgaccattgatcttcaatattatttataacgtcagcaatcttgttaaatgctacgaaattaactgattcttttccttcgtcatcaaaaacaaacacacctttaatcgagcttttactattaagatagcaaaatgcttgttccataatcataattacttctaatttagtcaaattcaaattagtctcacgatcatagtcaattccttcaaactctctacgagttaagcaaggatagtcagtgtttgctgcaaatacaccccatgcataagccaatgcatctttaataggaccagcaagttgatatttaactgcagaataattattcatgataaaatctgcagtagtatcttttccactacgctttacaccgcttaaaaagattagtttcatgtgtttctcctcaaatttagttaagattataacacatgaaactgaagcattaaacttctgctataattttgccatctttttctacttgaaaatacgtataaggaatcgttgctgtgcatactaaagctgggtctgaatcttccgtgtagctaaattctacttcagacaggtcagaaacccagggcttataaaaatttattgacatcacgatttcagttttactattatctaaaatgtaaagcgtaatgtattcaggacctgttttttgggcagtattttcgcctgtaagatagttactagttcctagcatccattcatacattcctatccacgacttaagctcttcgtcaactataaatctcacgatgagtggatcgtactcaaatgtaacacctggacgttgtgctcgaccaagtccaaacggcccagtcacggtatcagtaacaggtattctaattcctggaataggaactgactgagcatttaaagtaaaagcagatgtagtattactatgtggtattgatactacaaagttagttgtatttgcttggttaaaaatttgttgcagagcttgcgacatatattcctcataatgctttataactgttggtggtataatgggtctaagtcccttccattcaattccatttagaacaaacaacagaaaagaatggaagataatagaattaaatatttgaccagactttgtttgcagagaaacgttttccttttgaaacgaactgctgaagtggcatcaatacaacgttcgcccagtctttcggggcgatttcaacaaggctacccataatattaccaggtatatatgccttaatcatttggtctgcacccctaaatcctttcacttgactccaatcaatttttaatttcgttttattagtaatagtaggtgtatttgaatattgctttaaaagctcttctaggaattgctggcgagctttaggtggaatatagtgcaagttcaatccgtacattaaattatgcttacctaaaccaaggtaaattatcaaaggaaatttatcccagtaaggaagagtttccttgtgtttagcatcataagcaaaagcatatattcgtcccggctgcgggcgaacaactttatgtccttttacttgcttaatagtttcagcaaaccactttctggttttattattaattgctgcgccttcattacgaattttatcgcgcaatgtttgtctgaatgaatttatcataagcagttgtctttcttgcttattgagtttattcattggttttgattcaagcttttgaatcttttcagctgttttaattcctgaagcatattttgacattgccgaagtaaacgtagagtatttgattcctctttcttcagcaaattgctttcctgtcattccttttgcttttgcctttctgtattcaagacctatctgaatccatttcttttcgtttaatgattgcttaacctttggaacttggggagtgctttcattaattatttgaaaaatagccattatgcccccttaaagccaagagctcgtaatccatcttctgttagaattctaaattttattccacgcttttcagctaaagattgtgctgctttccatttgtcggtattaacagaatatgtataaatttcattcataaatcttttcttcgctgcggttgttagatgtgctggtttaactggtggttgtgtttcttttttaggttttatttcaataaaaaattcttgtccagaagaatctttcatccaaatatccatgaagtatctacgttttttcccttctgcattacaaaaataaggaattactgctgtttcactaccccatgcaataatttctggatttttatctaaccattcaaaaaagaatttttcccaatttgatctatacgtaatttttttagggtcacctctatactttgatatatttttaggaacccattttccagaatatgccattggattctccttataaatagataatatatttataaacaggagggcccatgctctttacattttttgatccgattgaatatgcggccaaaacggtgaataaaaacgcgccgactattcctatgacagatatttttagaaactataaagactattttaaacgcgctcttgcgggataccgcttacgtacttattatatcaaaggttcaccacgcccggaagaattagcaaatactatatatggaaatccacagctatattgggttttattgatgtgtaatgataattatgatccgtattatggatggattacttcacaagaagctgcttatcaagcatctatacaaaaatacaaaaatgtaggtggagaccaaatagtatatcatgtgaatgagaatggtgaaaaattttataatttaatatcatacgatgataatccatatgtttggtatgataaaggtgataaagctagaaaatatcctcaatatgaaggagcacttgctgctgttaatacgtatgaagatgctgttcttgaaaatgaaaaacttcgtcaaataaaaataatagcaaaatcagacatcaattcatttatgaacgaccttatacgtataatggagaaatcttatggaaatgataagtaataaccttaattggtttgttggtgttgttgaagatagaatggacccattaaaattaggtcgtgttcgtgttcgtgtagttggtctgcatccacctcaaagagcacaaggcgatgtaatgggtattccaactgataaattaccgtggatgtcagttattcaacccataacttccgcagcaatgtctggaattggaggctccgttactggtccggtagaaggaactagagtctatggtcattttttagacaaatggaaaactaacggaattgtccttggcacgtatggtggaatagttcgcgaaaaacctaatagacttgaaggattttctgatccgactggacagtatcctagacgtctaggaaatgatactaacgtattaaaccaaggcggagaagtaggatatgattcgtcttctaatattatccaagatagcaatctagacactgcgataaatcctgatgatagaccgctatcagagattccaactgatgataatccaaatatgtcaatggctgaaatgcttcgccgtgatgaaggattaagactaaaagtctattgggatacagaaggatatccgacaattggtattggtcatcttatcatgaagcagccagttcgtgatatggctcaaattaataaagttttatcgaaacaagttggtcgtgaaattactggaaacccaggttctattacgatggaagaggcggtaactttatttgaacgtgatttggctgatatgcaacgggacattaaatcacattctaaagtaggaccagtctggaaagctgtcaaccgttctcgtcaaatggcgttagaaaatatggcatttcaaatgggtgttggcggtgtagctaaatttaacacaatgttaactgctatgttagccggagattgggaaaaagcatataaagccggtcgtgattcattgtggtatcaacaaacaaaaggccgtgcatcccgtgttaccatgattattcttacggggaatttggaatcatatggtgttgaagtgaaaaccccagctaggtctctatcagcaatggctgctactgtagctaaatcttctgacccggctgaccctcctattccaaatgactcgagaattttattcaaagaaccagtttcttcatataaaggtgaatatccttatgtgcatacaatggaaactgaaagcggacatattcaggaatttgatgatactcctgggcaagaacgatacagattagttcatccgactggaacttatgaagaagtatcaccgtcaggaagaagaacaagaaaaactgtcgataatttgtatgatataaccaacgctgatggtaattttttggtagccggtgataaaaagactaacgtcggtggatcagaaatttattacaacatggataatcgtcttcaccaaatagatggaagcaatacaatatttgtacgtggcgatgaaactaagacggttgaaggtaatggaactatcctagttaaaggtaatgttactattgtagttgaaggtaatgctgacatcacagttaaaggagatgctaccactttagttgaaggtaatcaaactaatacagtaaatggaaatctttcttggaaagttgctgggacagttgattgggacgttggtggtgattggacagaaaaaatggcatctatgagttctatttcatccggtcaatacacaattgatggatcgaggattgacattggctaatatacttccaatgagcgctgatttaggagaatccatggaaggttcttctatcgacgtcacctttaccgctcaattagaaacaggtgaaacgttagtatctataaatataactagttacgaagaaactcctggggttttagtagaagaaaatcgcttatatggaacatatgaatctgtgtttggatttggaaatgacgcgttgaaatatcgtttaggcgatgaatttaaaactgctgcttcatgggaagaacttcctactgattctgatactcagttgtatttgtggaaagctcctcaaaatctccagaagacattcacttacgaagtaacattaatatatgactaccaagaacaaagtgaatctggaggttctggcagtaattctaggtcatcttctgatactactgaaccgtcagatcctcctgctccagtaagaaaaactctcgttaaaaattatactaaaactatagttggaaattggagtcgttgggctaataaattaagaagctatgtgtatgagaggtcatagatgtcaggattaagttatgataagtgtgttactgccggccatgaagcatggcctccaacagttgtgaatgctacacaaagtaaagtattcactggaggaattgctgttctcgtagcaggtgatccaattacagaacatacagaaattaaaaagccatatgaaacacatggcggagtgacacaacctagaacttctaaggtatatgtcactggaaagaaagcggttcaaatggctgatccaatatcatgcggtgatactgtgtctcaggcatcatctaaagtattcattaaataggatttaaaatggcaaatacccctgtaaattatcaattaacaagaacagcaaatgctattcccgagatattcgtcgggggtacatttgctgaaataaaacaaaacctcattgaatggcttaatggccaaaatgaatttttggattatgattttgaaggctcaagattaaacgttctgtgcgaccttttggcttataatacgctgtacattcaacagtttggtaatgctgctgtgtatgaaagctttatgcgtactgctaacttacgaagttcagttgttcaagctgcacaagataacggatatttacctacttcaaaatccgctgcgcagaccgaaattatgttaacatgcaccgacgcattgaataggaattacattactattcctcgcggaactcgctttttagcatatgcaaaagatacttctgttaatccatataacttcgtttctaccgaagacgttattgctattcgtgataaaaataaccaatattttccgcgtttaaaattggcccagggacgtatagtaagaactgaaatcatttatgataaattaacacctattatcatttatgataaaaatattgatagaaaccaggttaaattatacgttgatggagcagaatggattaactggacaagaaagtcaatggttcatgctggttctacatcgacaatttactacatgcgtgaaactattgatggaaataccgagttttattttggtgaaggtgagatttctgttaatgcggcagaaggagcattgaccgctaattatattggaggtcttaaacctactcagaactctacgattgttattgaatacatcagtactaacggtgcagatgcgaacggcgcagtcggattttcatatgcagatacattaacaaatataactgtcatcaacattaatgaaaatccaaacgatgacccagattttgttggggcagatggcggcggcgatccagaagatattgaacgtattcgcgaattgggtactattaaacgcgaaacccagcaacgctgcgtaactgcgactgactatgatacattcgtttcagagagatttggttctattattcaagcagttcagacgttcactgattctactaaacctggttatgcatttattgctgctaaacctaaatcaggactatatttaactactgtacagcgcgaagatattaaaaattatctcaaagactataatttagctcctattacgccatcaattatttctcctaattacctttttattaagactaatttaaaagtcacatatgctttaaataagctgcaagaatccgaacagtggctcgaaggtcaaataattgataaaattgatcgttattataccgaagatgtagaaatttttaactcatctttcgctaaatctaagatgttgacatatgtagatgatgcagatcattctatcattggctcatccgcgacaattcaaattgttcgtgaagtacaaaacttctataaaacgcctgaagcaggtattaaatacaataatcaaataaaagaccgttctatggaatctaatacgttttcatttaattctggacgaaaggttgtaaatcctgatactggtttagaagaagatgtattatatgacgttcgcatagtatcaacagaccgaaattctaaaggaattggtaaagttattattggtccatttgcttctggcgatgttacagaaaataaaaacattcgtccatatacaggaaacgattttaacaaattagcaaattctgatggacgcgacaaatactatgttatcggtgaaataaattatccagctgatgtgatttattggaatatcgctaaaattaatttaacatctgaaaaatttgaagttcagaccattgaattatattctgacccaaccgatgatgttatctttactcgcgatggttcactgattgtatttgaaaatgacttacgtccacaatacttaactatcgatttggagcctatatcacaatgacagtaaaagcaccttcagtcactagtctcagaatttccaagttatccgcaaatcaggtgcaagtacgctgggatgacgttggtgctaatttctactattttgtagaaatcgctgagacaaagacagactcgggggaaaatctcccgagtaatcaatatagatggattaacttaggatatactgcaaataacagcttcttttttgacgatgctgacccattgacatcatacattattagagtagctacagctgcacaagattttgagcagtctgattggatttataccgaagagtttgaaacttttgctacaaatgcttatacatttcaaaacatgattgaaatgcaattagctaataaattcattcaggaaaaatttactcttaataattctgactatgttaattttaataatgacactataatggctgcattgatgaatgaatcattccaattcagcccatcatatgctgatgtttcatcaataagtaattttattattggtgaaaatgagtatcatgaaatacaaggttctattcagcaagtatgtaaggatattaatcgagtttatttgatggaatcagaagggattctatatctttttgagcgttatcaacctgtagttaaagtatccaatgataaaggtcaaacctggaaagctgtaaagctcttcaatgaccgtgtaggatatcctttatctaagactgtatattaccaatctgcgagcacaacatatgttctaggatacgacaagattttctatggccgcaaatctactgatgttagatggtcagctgatgatgtcagatttagttcgcaggacataacattcgctaaacttggtgatcaacttcatttgggatttgatgttgaaatctttggtacttatgctacattacctgcaaacgtgtatcgtatagctgaagctattacttgcaccgatgattacatttacgttgtcgccagagacaaagttagatacataaaaacgagtaatgcacctatagattctgatccattatctccaacatattcggaaaggctatttgaacctgatacaatgactataactggaaatcctaaagcagtatgctataaaatggattctattggtgataaagtttttgctcttattatcggtgaagttgaagcattaaatgctaatcctagaacgtcaaaaataattgattctactgataaaggaatatatgttttaaatcatgacacaaaaacgtggaaaagagtttttggcaacactgaagaagaaagaagacgtattcaacctgggtatgcgaatatgtcaactgatggtaaattagtttctctatcttcgagtaattttaaatttttaaatgataacgttgttaatgaccctgaaactgtagcaaaatatcagttaatcggtgccgttaaatatgaatttcctcgtgaatggttagctgataagcattatcatatgatggcatttatagcagatgaaaagtctgattgggaaacttttacgcctcagccaatgaaatactatgcagaaccattctttaactggtctaaaaagtctaatacacggtgctggataaacaactctaatagggctgtggtagtttatgcagatttaaaatatactaaagttattgaaaattttccagaaacatcgccagatagattagttcatgaatactgggatgacggcgattgcactatagtaatgccaaacgttaaattcacgggatttaaaaaatatgcgtctgggatgcttttttataaatcctctggtgaaataatttcttattatgattttaactatcgagtgagagacacggttgaaataatttggaagccaactggaatatttttaaaagcatttttacaaaaccaagagcatgaaactccttgggcaccagaagaagagcacggattagctgaccctgatttaagaccattgattggcacaatgatgcctgattcttatttactacaagattcgaattttgaggcattttgcgaagcatatattcaatatctttctgatggatatggaactcagtataacaatttacgaaatttaattcgtaacaaatatccacgagaagagcatgcatgggaatatttgtggtcagagatatataaaagaaacatttatttaaatgctgacaaacgtgatgctgttgcaagattttttgaatcacgtagctatgatttttattctactaaaggaattgaagcatcatacaagtttctttttaaagttctttataatgaagaagttgaaattgaaattgaatctggggctggtactgaatatgacataatcgttcaatctgattctttgactgaagatttagtaggacaaacgatttatacagccacaggaagatgtaatgttacttatatagaaagaagttattctaatggtaaattgcaatggaccgtaactattcataatcttttgggaagattaattgctggtcaagaagttaaagcagaaagactccctagttttgaaggcgaaattattcgtggagttaaaggaaaggatttgcttcaaaacaatatagactatattaatagaagtagatcatactatgtaatgaaaattaaatccaatttaccttcttcccgctggaaatctgacgttattcgttttgttcatccagtaggatttggatttatagcaattacccttttaacgatgtttattaatgttggtttaactcttaaacatacagagactataattaataaatacaaaaactataaatgggattctggattgcctactgaatatgctgatagagtagctaaattaactccaactggtgaaattgaacatgattcagtaacaggagaagcaatttatgaacctggcccaatggctggtgtaaaatatcctcttcctaatgactataatgctgaaaataataattcaatatttcaaggtcaattgccttctgaacgacgcaagttaatgagtcccctatttgatgcttctggaacaacatttgcgcaatttagggatttagttaataaacgtctaaaagataatataggaaatccaagagaccctgaaaatccaacacaggttaaaatagatgaatgattcaagtgttatctatcgtgcgatagttacttcaaaatttagaacagaaaaaatgttgaatttttataattcaattggaagtggtccggataaaaacactatctttatcacatttggaagatcagaaccgtggtcatcaaatgaaaatgaggtgggctttgccccaccttatccaaccgattctgtattaggcgtaactgacatgtggacgcatatgatgggaacagtaaaggttcttccatcaatgcttgatgcggttattcctcgtagagattggggagatactagatatccggatccatacacatttagaattaacgatattgtagtatgtaactcagctccttacaatgctactgaatcaggcgcaggatggctagtatatcgttgtttagatgttcctgatactggaatgtgttcaatcgcatctttaactgataaggatgaatgccttaaattaggcggaaaatggacaccttctgttaggtcaatgactcctcctgaaggtcgaggagacgcggaaggaacaatcgaacctggagacggatatgtttgggaatatctttttgagattccgcctgatgtatctataaatagatgcacaaatgaatatatcgtagttccttggcctgaggaattaaaagaagacccaactagatgggggtatgaagataatctcacttggcaacaagatgattttggattaatttatcgcgttaaggcaaacactatacgttttaaagcatatttagattcagtttactttcctgatgctgcattaccgggaaataaaggatttagacaaatatcaataatcaccaatcctcttgaagctaaagttcatccaaatgacccaaacgttaaagctgaaaaggattattatgatccggaagatttaatgaggcattcgggcgaaatgatttatatggaaaataggccacctattatcatggcaatggatcagacagaagaaatcaatattctgtttacattttaaattaagggagcccatgggctccctttttctttataaatactataaactcataaggaaaccgctatgttcattcaagaaccaaagaaattgattgataccggcgaaattggtaacgcttctactggtgatatcttattcgacggtggtaataaaattaatagtgattttaacgcaatttataatgcgtttggcgatcagcgtaaaatggcagtagcaaatggcactggagcagatggtcaaattatccatgctactggatattatcaaaagcactctatcgcggagtacgcaactccagtgaaagttggcactagacatgatattgatacctctactgtaggtgttaaagttattattgaaagaggagaacttggcgattgtgttgaattcattaactctaatggatcaatatcagttactaatcctttaacgattcaggctattgattcaattaaaggtgtttcgggtaatttggtagtaactagcccatatagtaaagttactttacgttgtatttcatctgataattctacgtcagtttggaattattctattgaaagtatgtttggccaaaaggaatcaccggccgaaggtacatggaatatttctacatctgggtcagttgacattccattgtttcatcgtactgaatataacatggctaaattgttagttacatgccaatcagtagatggaagaaaaattaaaacggcagaaataaatattcttgtagatactgttaattcagcggtcatttcttctgaatatgctgtcatgcgagttgggaatgaaactgaagaagacgaaatcgctaatattgcatttagtattaaaacaaattatgtaacagcgactataagttcttcaactgtcggtatgagagcagcagttaaagttatcgctacgcagaaaatcggggtggctcaataatgaaacaaaatattaatatcggtaatgttgttgatgatggtaccggtgactacctgcgtaaaggtggtataaaaataaatgaaaactttgatgaactttattatgaacttggcgatggagatgttccatattcagccggtgcctggaaaacttataatgcttcatccggtcaaacattaaaagctaagtggggaaaatcatacgctattaatacctcttctggaagagtaactttacaacttcctaaaggaactgttaatgattataataaagtaattagagctagggatgtatttgcaacatggaacattaatccagttactttagtagctgcttctggggatacaattaaagggtcgtcatcgtcagttgaaattaatattcaatttagtgatttagagctcgtttattgcgctccaggacgttgggagtatgtcaaaaacaaacaaattgataaaattattagttcagatattagtaatgtagctcgcaaagaatttttagtagaagttcaaggacaaactgactttttagatgttttccatggaactagttataatgtcaataacatcagagtaaaacaccgcggtaacgaattatattacggcgatgtatttagtgaaaacagtgactttggctctcctggggaaaatgaaggagaattaattcctcttgatggatttaatattaggttaagacagccttgtaatattggcgacactgttcaaattgaaacgtttatggatggtgtatcacaatggagaagttcatatacaagacgccaaataaaagtgctagattcaaaactaacatcaaagacttctttagaaggaagcatttatgttactgatttatcggcgatgaaatcaattccattttcagcttttggattaattcctggcgaacccattaatcctaattctcttgaggttcgttttaatggaattttacagcaacaagctggaacagccggatatcctctgtttttgtgcgaaggcgctaattcagatacgcaagaaggatgtatatctcttggtggcgaatggaaagaatcaaacacagattattctatagaatatgaagatggaaaacctaccagtcttttatttgatagaaaatttgaatcaggcgatataatcgttataacgtggttcaataatgatttaggaactcttttagaaaaagatgacatcattgaattaacggatgaccgttatgttagtaaaggatcatctaccgaagttactggtgatgtagccttaacagattttgataaaatcggttggccaaatgttgaaaaagttgattcttatactagaacgtataattcaatatcatctattttcgatagcatttatcctgtaggttcaatttatgaaaatgctataaatccaaataatccggtgacttatatgggatttggttcatggaaattatttggtaaaggacaagttttagtaggatggaatgatgatgttacggatccaaactttgctttaaacaataatgatttagattctagcggaaatccttcacatactgccggtggaacagttggaacaacatcggtgacacttgagaacgcaaatcttcctgcgactaaaactgatgaaaaagttttaattgaagatgaaaacggatcagttattattggaggttgtcaatatgacccagacgaaactggtcctatatatacaaaatatcgtgaagactacgcaacaacaaactcttcacatactcctcctactaatattagtaatattcaaccgtctattactgtataccgttggataaggattgcataatgagtttacttaataataaagcgggagttatttcccgcttagcagattttcttggttttagaactaagaaaaatgatatttcggttatgaataatcagccagtaggcgctgtaacaatttcacaaatagcaaaaggtttttatgacccgaatgtagaatctgctatcaatgatgttagaaatatggcagagcaaccggttggagctgtattagttaatataagcggcgtatctcctactggcgtgcaacaaaccgactattggtcatttgaaggaactgttactgatacttcagtcaaatcaggtgacccagttattgttaacatgtttggtattccagttaaagctactaatggaatgacttcaattgaatttactagtgccgttagaatagctctacaggaaatggttgtaaaatttattgcaattgattcatttgaagaccatcctaccataggaaataaaatacaagttaagtatttagataaccaagaacatatcttagaacaatactctgataaaggaattactttcaaacaggaaataatttctccttctaaacctgggtatggaacttggcaattattaggtgcgcaaactgttacgctagatagtcacacacaacctacagtattttattattttgagagagtagcatgagtaacaatacatatcagcacgtatcaaatgaatcaaaatatgttaaattcgatccagtaggatcgaattttcctggcactgttacgacagtacagtctgcattatcaaaaataagtaatatcggcgtaaatggtattcctgatgcaactatggaagttaaaggaatagcaatgattgcgtcagagcaagaggttttagatggaactaataattctaaaatcgttacaccagctacattagcaacaagattattgtatccaaatgctactgaaactaaatatggtttaacgcgttattcaacaaatgaagaaacattaaaaggctcagataataattcatcaataacaccacaaaaactgaaataccacactgacgatgtgttcaaaaatagatattcgtctgagtcatcaaacggggttattaaaatatcatctacacctgcagctttggccggcgtagatgatactacggcaatgactccattaaaaacccaaaaacttgcaataaaattaatttcacaaatagctccttcagaagacactgcaacagaatcggtgagaggagtagttcaattatctactgttgcgcaaactcgtcaaggaactctccgcgaaggatatgcaatttccccgtatacctttatgaattctgttgcaacacatgaatataagggtgttatacgcctaggaacgcagactgaaattaataataatttgggtggtgttgcagtaacaggtgaaacactaaatggtcgaggagctaccggttctatgcgtggagtagttaaattaacgacgcaagccggtattgcccctgaaggtgatagctctggagcattagcatggaacgcagatgtaattaatactcgtggtggacaaactattaatggttctttaaatttagaccatcttacagcaaatggaatttggtcacgcggtggaatgtggaaaaatggcgatcaacctgttgccactgaaagatatgcgtccgaacgagttccggttggaactattatgatgtttgcgggtgattcagcacctccaggttggattatgtgtcatggtggaaccgtgtcaggtgaccaatttcctgattatagaaacgtagttggaacaagatttggtggggattggaataatccagggattcctgatatgcgaggtcttttcgtcagaggagccggcacaggcggtcatattttaaatcaacgtggacaagatggctatggaaaggatagactgggcgtaggatgtgacggaatgcatgttggtggtgttcaggcacaacaaatgtcataccataaacatgctggtggttggggtgaatataacagaagtgaaggcccatttggcgcgtcagtttatcaaggatatcttggaactagaaaatattccgactgggataatgcttcatacttcactaatgatggatttgaattaggtggaccgagagatgctcatggtacacttaatcgtgaaggattaattggttatgaaactagaccatggaatatatcattaaactatattattaaagttcattactaaggattacaaatgattgaattaaaagagttaccttttgttgatagcgttcctgacgaaggtcaggaacgtatttcatggattaaaaatggtgaagaaatattaggagctagtactaagtatggaaatgatggatcaatgaatagaccaattgtttccgtgtttaaaaacgtcgaagttcttgatgaaaatgtgggaattcttaaaactgccattgaaacatcacagaaagatattaaaacaattcaaggagttttagatgtatcaggagatatagaagcactatcgcagatcagtgttaataaaaatgacatatcgaatttaaagacacttaccagtgaacacactgatatattaactggaactaataatacagttgacaaaattattgctgatataggtccatttaatgatgaagaaaactctgtttatagaacaattagaaatgatttattgtggattaaacaggaattaggacaatattctggccaagacattaacggtcttcctgttgttggtaatgctagcacaggaatgaaacacagaataataacaaatagtacattattatcttcacagggcattcgtttaagcgaattagaaaataaatttactgaatctgacgtaggatcattaactgttgaagttggtaaattacgtgatgaacttggtaataaaccggtagattttggaccaaatatttataatagattaaacactatagatgataaacaaactttaataaattctgatatagcagaaattaaatcttctattggatacccagaaaatgtttctataataacagaaattaataataacaaaagtagcattgaagctattaataatgaattaaatcagagtgaaggtgttaaacaacgcttaacggctattgaaacttctataggttcagatgatattccttctagcattaaaggaaaaattaaaaatcacacaacttctattgagtctttaaacggaattgttggtgaaaacacttcgtctggtttaagagcgaatgtttcgtggttaaatcaaattgttggaactgactccagcggaggacaaccgtctccttctggatctctattaaataaagtttcagtgcttgaaggagaagtttcagttttaaacaataatgttcaaaatatacaagttgaaataggaaataatagaacaggaattaaaggtcaagttattgaacttacttcacttataaatggaaataatcctgacggatcaactgttgaagaacgaggattaactaattctgtaaaaacgaatgaaaccaacattgcggcagtcacacatgaagtaaatacagctaaagacaatatatcctctttacagagcagcgttcaagctctacaagaagcaggttatattcctgaagctccaaaagatggccaagcttacgttcgtaaagacggcgaatgggtactactttctacctttttatcaccagcataacatggggccgcaaggccccaaaggattttaaatgtcaggatataattctcagaatccaaaggaactcaaagatgtcattctaagacgtttaggggctccaattatcaatgttgagttaacacccgatcaaatttatgattgcatccagcgtgccctagaattatacggtgaataccattttgatggacttaacaaaggttttcatgtattttatgtaggagatgacgaagaaaaatataagaccggagtcttcgatttaagaggttcaaatgtattcgcagtaactcgaattttgcgtacaaatattggatcaataacgtcaatggacggaaacgctacatatccatggtttactgactttcttttaggaatggctggtattaatggcggtatggggacttcttgtaatagattttatggaccaaacgcctttggagctgatttagggtattttacccagcttaccagttacatgggaatgatgcaagatatgctttctcctattccagacttttggttcaattcagcaaatgaacaactcaaagtcatgggaaacttccaaaaatatgatttgattatcgtagaaagctggactaaatcatacattgatacaaacaaaatggttggaaatacagtaggatatggaacagttggtccgcaagatagttggtcattatctgaacgatataataatccagaccataatttagtaggtcgtgttgtgggtcaagattcagatgttaagcaaggtgcttataataatcgttgggtgaaagactatgcaacagctttagctaaagaactgaatggccaaattttagcacgtcaccaaggaatgatgcttcctggcggtgttacaattgatggacaacgcttaatagaagaagctcgattggaaaaagaagcattacgcgaagaactatacttacttgaccctccatttggaatttttgtaggttaatatggctacttacgataaaaatctctttgctaaattggaaaaccacacgggttattctcagactaatgaaactgaaatattaaatccttatgtaaattttaaccattatcaaaacagccaaatattggccgatgtattagtagctgaaagcattcaaatgcgaggtgtagaatgctattatgttccaagagagtatgtttcccctgatttgatattcggcgaagacctaaaaaataaatttactaaagcttggaaattcgctgcatatttaaattcatttgaaggatatgaaggagctaaatcgttctttagtaattttggcatgcaagtgcaggatgaagtaactttgtccattaatccaaatttgtttaaacatcaagttaacggaaaagaacctaaggaaggggatttaatatattttcctatggataacagcttattcgaaattaactgggttgaaccatatgatccattttatcaattaggccaaaacgctattcgtaaaattacagcaggtaaattcatttattctggagaagaaattaatccagttctacagaaaaatgaaggaattaacattccagaattcagtgaattagaattaaatcctgttcgtaatcttaatggcattcatgatattaatattgatcaatatgctgaagtagatcaaattaattctgaagctaaagaatatgttgaaccttatgttgttgtcaataatagaggcaaatctttcgaatctagcccatttgataatgatttcatgaattaataaatattataaactaattaaagcccagattaggagaaatcatgtttggttatttttataattcgtcttttagacgatatgctaccttgatgggcgatttgttttcaaatatccaaatcaaacgtcagttagaatctggtgataagtttatacgtgttcctattacgtatgcatcaaaggaacacttcatgatgaaattaaataaatggacatcgataaattcgcaagaagatgtagctaaagttgaaactattctacctcgtataaatttacatttagttgattttagctataatgctccatttaaaacaaacattttaaatcagaatttactgcaaaaaggcgcaacttctgtagtatcacagtataatccatctcctattaaaatgatttatgaattgagtatctttactcgttacgaagacgatatgtttcaaatagttgaacagattcttccatattttcaacctcattttaatacaactatgtacgaacagtttggaaatgatattccatttaaaagggatattaaaattgtactgatgtctgctgctatagatgaagctatagatggagataatttatctcgtcgtagaatcgaatggtcactaacatttgaagtaaacggatggatgtatcctccagtagatgatgcagaaggattaattcgtactacttatacagattttcacgccaatacaagagatttgcctgatggcgaaggtgtttttgaatctgttgatagcgaagttgttcctcgagatattaacccagaggactgggatggaacagtaaaacaaactttcactagcaatgtaaatagaccaacaccgccagaacctcctggcccaagaacatagaggttattatggaaggtcttgatataaacaaacttttagatatttctgacctccccggaatcgacggggaggaaattaaagtatatgaacctctacaattagtagaagttaaaagcaatcctcaaaaccgtactcctgacttagaagatgattatggagtagttcgtcgaaatatgcattttcaacaacaaatgctaatggacgcagccaagatttttcttgagacggcaaagaatgctgattctcctcgtcacatggaagtatttgcaactcttatggggcaaatgactacgacgaacagagaaatactgaagcttcacaaagacatgaaagatattacatctgaacaggttggcaccaaaggcgctgttcctacaggtcaaatgaatattcagaatgcgacagtattcatgggttcaccaacagaattaatggacgaaattggtgatgcttacgaggctcaagaagctcgtgagaaggtgataaatggaacaaccgattaatgtattaaatgatttccatccgttaaatgaagctggaaaaattttaataaaacacccgagcttagcggaaagaaaagatgaagatggaattcattggataaaatcacagtgggatggaaaatggtatcctgaaaaattcagtgattatcttcgtctacacaaaatagtaaaaattccaaataattctgataagcctgaattatttcaaacttataaagataagaataataaaagatctcggtatatgggtcttcctaacttgaaacgagctaatattaaaacacagtggactcgtgaaatggttgaggaatggaaaaagtgccgagacgatattgtttattttgcagaaacatactgcgccattactcatattgactatggtgtcataaaggttcaattacgtgactatcagcgtgatatgctcaaaataatgtcatctaaacgtatgactgtttgtaatttatcacgtcagcttggtaaaacaactgtagtagctatttttcttgcacactttgtatgttttaacaaggataaagctgtaggtattcttgcgcacaaaggctcaatgtctgcggaagttttagatcgtactaagcaagcaattgaactacttcctgactttttacagccaggaattgttgaatggaataaagggtctattgaacttgataatggttcctcaatcggagcctatgcttcctctcctgacgcagttcgtggtaactcgttcgcaatgatttatattgacgaatgcgcgtttattccaaacttccatgattcctggcttgctattcagccggtaatttcatctggtcgtcgttcgaaaattattattactacgactcctaatggattaaatcatttttatgatatttggactgctgccgttgaaggtaaatcagggtttgaaccatacaccgctatttggaattcagttaaggaacgtctttataacgatgaagatatttttgacgatggatggcaatggagcatacaaaccattaatggttctactttagcacaattccgtcaagaacataccgcagcgtttgaagggacttctggtacattaatttcaggaatgaaattggctgttatggatttcattgaagtaactccagatgatcatggttttcatcgatttaaaggccctgaaccagatagaaaatacattgcaactttagactgttcagaaggtcgtgggcaagattaccacgctttacatattattgatgttaccgatgatgtgtgggaacaggttggtgttttacattcaaataccatttctcatttaattctgcctgacatcgttatgcgttatttagtagaatataatgaatgcccagtttatattgaattaaatagtactggtgtgtcagttgcgaaatcactttacatggatttagaatacgaaggcgttatttgcgattcatatactgatttaggaatgaagcaaactaaacgaacgaaagcagtaggatgctctacattaaaagaccttattgaaaaagataagcttattattcatcaccgtgcaactattcaagagtttagaacttttagcgaaaaaggcgtgtcttgggcggctgaagaaggttatcacgacgatttagtaatgtctttagtgatttttggatggttatcaacgcaatcaaaatttattgattatgctgacaaagatgacatgcgactagcatctgaagtgttttcaaaagagcttcaagatatgggtgatgaatacgctccagttatatttgttgattcggttcattctgctgagtatgttccagtatctcatggtatgtcaatggtataaatatattaaagcatattaaagaggattaaaaatgactttattatctccgggcattgagctcaaagaaactacggttcaaagcaccgtagttaataactctactggtacagcagctttggccggtaaattccagtggggtcctgcttttcaaattaaacaggttacaaatgaagtagatttagttaatacttttggtcaacctacggctgaaactgctgactattttatgtctgcgatgaatttcttgcagtacggaaatgacttacgagtagttcgtgctgtcgatagagataccgctaaaaactcatctccgattaccggtaatattgaatacactatttctaccccaggtagtaactacgcggttggagataaaatcacggttaagtatgtttcagaagatgttgaaacagaaggtaaagttaccgaagtagatgctgatggaaaaattaagaaaattaatattcctactgcaaaaattatcgctaaagcgaaagaagtcggtgagtatccagcactaggttctaactggactgccgaaatttcttcgtcttcctctggtttagctgcagtaataactcttggaaaaattattactgattctggtattttattagctgaaattgaaaatgctgaagctgctatgacagcggttgactttcaagcaaatctcgaaaaatacggaattccaggagtagtagcgctttatccaggcgagttgggcgataaaattgaaattgaaatcgtatctaaagctgactatgcaaaaggagcttctgcattactcccaatttatccaggtggtggtactcgtgcatctactgccaaagcagtgtttggatatggaccacaaactgattcacaatacgctattatagttcgtcgcaatgatgctattgttcaaagcgttgttctttcgacaaagcgaggtgaaaaagatatttacgatagtaacatctatattgatgactttttcgcaaaaggtggttcagaatatattttcgcaactgcgcaaaactggccagaaggcttctctggaattttaactctgtctggtggattatcatcaaatgctgaagtaacagcaggagatttgatggaagcttgggacttctttgctgaccgcgaatctgttgacgttcagttgtttattgcgggttcttgtgccggtgaatctttagaaacagcatctactgtccaaaaacacgtcgtttcaattggagatgctcgccaagattgcttagtattgtgctcaccaccgcgtgaaactgttgttggaattcctgtaactcgtgcagtagataatttagttaactggagaactgcagcaggttcatatactgataataactttaatatcagttcaacctacgcagcaattgatggtaactacaaatatcagtatgacaaatataatgatgtgaatcgttgggttccattagcagctgatattgctggtttatgcgcaagaactgataacgtatctcagacttggatgtctccagctggttataatcgtggccagattcttaacgttattaaacttgctattgaaactcgccaagctcagcgcgaccgtttataccaagaagctattaatccagtaactggtacaggtggcgatggttacgtattgtatggtgataaaacagctacttctgttccttctccatttgatcgtattaacgttcgtcgtctgtttaatatgttgaaaacgaatatcggacgtagttcaaaatatcgtttgttcgaattaaacaacgcgtttactcgttcatcattccgcacagaaactgcccaatacttacagggaattaaagctctcggtggaatttatgaatatcgtgtagtttgcgatacaacaaataacactccgtcagtaattgatagaaatgagtttgttgcaacattctacattcaaccggctcgtagtataaattatatccaacttaatttcgtcgcaactgctaccggtgcagattttgatgagttaactggtcttgcaggttaattgattatggggcttcggcccctattctcgaggaaacaagtgattatttctaagtttgttacaataaaaccaagaaatcattcaaaaatgtggtcgacaattctgggatataaagtatcatatcatgatacagtatctgttccaatagaattaatgccaaagaatagtaataaaatagttgacgctaaatgtgatttgtgtggtactaaatttagtagaagcattcaacttttaaatagaacacccacacatgcatgtagaaaatgtagcattaaacaagttgctattaaaaattcggaagttcaatctggaataagcagaccatggcaaagaggtgataaacatcctcgatggactggcaaaagaaaagagtttgcattatatgctagtagagttcattctataactaagtcagctaaaataagaaaaatctggtcaaaatggccgaatgctgataaaataggaatgtgcggcgtagaaggtgcttatcaactcgatcataaagtatctatcaaatatggatttgataatttaattccgccggaaattatagcaagtgtaaaaaatttagaaataatcacttgggaatctaaccgagaaaagtcaaaaagaaatagcgtagatctttgggatttactagaatgattctaaaggcctgtttcggcaggccatataaatacactatatccttaattctttaattctatatgccctaggttaaacatagggatataaatactacagaggctaatatgtttgtagatgatgtaacacgagcgtttgaatctggtgattttgctcgacctaacttattccaagtagaaatttcttatcttggacaaaattttacgtttcaatgtaaagccactgctttaccagctggtattgtagaaaaaattccagtcggttttatgaaccgtaaaattaacgtagcaggcgatcgtacattcgatgactggactgttacagtaatgaacgatgaggcacatgatgctcgtcagaagtttgttgattggcaaagcattgctgctgggcaagggaacgaaattactggtggaaaacctgcagagtataaaaagagcgctattgttcgtcaatatgctcgtgatgctaaaacagtaacaaaagaaattgaaattaaaggtctgtggcctactaacgtgggtgaacttcagttagattgggattcaaacaatgaaatccaaacatttgaagtaactcttgctctcgattattgggaataaaatgaatggggagaaatccccatcctgcttaaagcagagaagtccattataaatataactataattcccatttggagaatacaatgaaatttaatgtattaagtttgtttgctccatgggctaaaatggacgaacgaaattttaaagaccaagaaaaagaagatcttgtttccattacagccccaaagcttgatgatggagcaagagaatttgaagtaagctcgaacgaagctgcttctccttataatgctgcattccaaacaatttttggttcatatgaaccaggaatgaaaactactcgtgagcttattgatacatatcgtaatctcatgaataactatgaagtggataatgcagtttcagaaatcgtttcagacgctatcgtctatgaagatgatactgaagttgtagcgttaaatttggataaatctaaatttagcccaaaaattaaaaatatgatgttagatgaatttagtgatgtattaaatcatctatcatttcaacgaaaaggttctgatcattttagacgttggtatgttgattcaagaattttctttcacaaaattattgatccaaaacgtccaaaagaaggcataaaggaattacgtagattagaccctcgccaagtccagtatgttcgtgaaattataacagaaactgaagctggcacaaaaatagttaaaggttacaaagaatattttatatatgatactgcccatgagtcatacgcatgtgatggtagaatgtatgaagctggcacaaaaataaaaattccgaaagctgccatcgtttatgcccattctggattagtcgattgttgcggtaaaaatatcatcgggtatttgcatcgtgctgttaaacctgctaaccaattaaaattattagaagatgctgtagtcatttatcgcattactcgtgctcctgaccgtcgtgtttggtatgtagacacaggtaatatgcctgctcgtaaagctgctgagcacatgcaacatgttatgaacacgatgaaaaaccgtgtagtatatgatgcatcaacaggtaaaataaaaaatcaacaacataatatgtctatgaccgaagactattggttgcagcgccgtgatggtaaagctgtgacagaagttgatactcttcctggtgctgataatactggcaatatggaagatattcgttggtttagacaagctctttacatggcattacgtgttcctctttcacgcattccacaagaccaacaaggcggtgtgatgtttgattctggaactagcattacacgtgatgaattaacgtttgctaaatttattcgtgagttacagcacaagtttgaagaagttttcctagatccacttaaaacaaatcttttgcttaaaggtataatcacagaagatgagtggaatgatgaaataaataatattaagatagaatttcatcgggatagctactttgctgagctcaaagaagcagaaattttggaacgaagaattaatatgctaaccatggcagaaccatttattggtaaatatatttctcacagaactgctatgaaagatattttgcagatgactgatgaagaaatagaacaagaagccaagcaaattgaagaagagtctaaagaggctcgtttccaagaccccgaccaagaacaagaggatttttaatggaaggtttaattgaagctattaaatcaaacgacctcgtagccgctcgtaaattatttgctgaagccatggctgcaagaacgattgatttaattaaagaagaaaaaatcgctatcgctcgtaatttcttaatcgaaggtgaagaacctgaagacgaggatgaagatgatgacgaagatagtgatgataaagacgacaaaaaagacaaagactctgatgaagatgacgaagacgaggatgatgaataatgcttctgatccctgaaactcatgaattagttctcgagaatgtcgaagcacttattcctgaagcacagggtcgctttgacgaattgtcttctgctttaaataaagacgatataaatacaattgtcgagaatatgcttgatgatgaaactgatttagcggttgcattagcttctattaatgaaaatatgccgttaaatgaatttatcgttaaacatgtttctgcccgtggtgaaattactcgcactaaagatcgcaaaacccgcgaacgtaatgcatttcaaactaccgggttgtctaaagcaaaacgtagacaaattgctcgtaaagctaccaaaacgaagattgccaatccagcaggtcaatctcgtgctcagcgtaagcgtaaaaaagctcttaaacgccgtaaagcattaggattaagctaatgaatgaaccccaattactaattgaaacttggggtcaacctggcgaaattattgatggcgtaccaatgcttgaatctcatgatggaaaagacttaggtttaaaaccgggtttatacatcgaaggaatattcatgcaagcggaagtcgtcaatagaaataaacgtctttatccaaaacgtatattagaaaaagcggtaaaagactatattaatgagcaagttttaactaaacaagctctcggagaattaaatcatcctccacgcgctaatgttgacccgatgcaagccgctatcattatagaagatatgtggtggaaaggaaatgacgtatacggacgagctcgtgttattgaaggtgaccacggtcctggagataaattagcagctaatattcgtgccggatggattccaggagtttcttctcgtggattaggttcattgactgacacaaataaaggttatcgtatcgtaaacgaaggattcaaattaactgtaggtgttgatgcagtatggggtccaagtgctccagatgcatgggtaactcctaaggaaattacagaatcacagacggcggaagccgatacaagtgccgatgacgcctatatggctctcgcagaggccatgaaaaaagcgttataaatattattatctaaacaacaggactacaaaatgcttaaagaacaactgattgccgaagcgcagaaaattgatgcttccgttgctcttgatagtattttcgaatcagttaatatttctccggaagcaaaagaaactttcggcactgtattcgaagctaccgtcaagcagcacgccgttaaattagctgaatctcatatcgctaaaattgctgaaaaagcagaagaagaagtagaaaaaaataaagaagaagcagaagaaaaagctgagaagaaaatcgctgagcaagcttctaaattccttgaccatcttgcaaaagaatggctcactgaaaataaattagcagtagataaaggtatcaaagccgaactgtttgaatccatgcttggtggattgaaagagctcttcgttgaacacaacgttgttgttccagaagaatcagttgatgttgtagctgaaatggaagaagaactgcaagaacataaagaagaatcagctcgtctgttcgaagaactcaataagcgtgacgcatatatcaattatgtgcagcgtgaagtggcattgagcgaaagtactaaagatctgactgagtctcaaaaagaaaaagtctctgctctggtcgaaggtatggattattcagatgcattctcaagtaaattgagtgcaatcgtagaaatggtgaagaaatctaataaagatgaaagcactattactgagagtataaatactcctgatactgaagcagccggactgaatttcgtcactgaagctgtagaagataaatctgcacaaggtgcagaagatattgtaagtgtatatgcgaaagtcgcatctcgtttctaattttaaaggttaacacaaatgactatcaaaactaaagctgaacttttgaacaaatggaagccattactggaaggtgaaggtttaccggaaattgctaatagcaaacaagcgattatcgctaaaatctttgaaaaccaggaaaaagatttccagacagctccggaatataaagacgaaaaaatcgcccaggcatttggttctttcttaacagaagctgaaatcggtggtgaccacggttacaacgctactaacattgctgctggtcagacttctggcgcagtaactcagattggcccagctgttatgggtatggtacgtcgtgctattcctaacctgattgctttcgatatttgcggtgttcagccgatgaatagcccgactggccaggtattcgcactgcgtgcagtatatggtaaagacccaatcgctgctgatgctaaagaagcattccacccaatgtatggtccagatgcaatgttctctggtcagggtgctgctaagaaattcgctgctttgaaagcaagtgatactcttgaagtcggaactatttacactcacttcttccaggaaactggtacagtatatctgcaagctacagcagctaaacaaattgattcaggcgcatctgacgcagacaaattagatgctgaaattaagaaacaaatggaagctggtgtactggtagaaatcgctgaaggtatggctacttctatcgctgaacttcaggaaggtttcaacggttctaccgataacccatggaatgaaatgggcttccgtatcgataaacaagttatcgaagctaaatctcgtcagctgaaagctgcttactctattgaattagcacaagacctccgcgctgttcatggtatggatgctgatgctgaactgtctggtattctggctaccgaaatcatgttggaaatcaaccgtgaagttgttgattggattaactactcagctcaggttggtaaatctggtatgaccctgactccgggttctaaagctggtgtatttgacttccaggatccgattgatattcgtggtgctcgctgggcgggtgaatcctttaaagctctgttgttccagattgacaaagaagcagttgaaattgctcgtcagaccggtcgtggtgaaggtaacttcattatcgcttcccgtaacgtagttaacgttctggcttcagttgatactggcatttcttatgctgcacagggtctggctaccggctttaacactgatactaccaagtcagtatttgctggtgttctgggtggtaaataccgtgtatatatcgaccagtatgctaaacaggattatttcactgtaggttataaaggtccgaacgaaatggatgctggtatttactacgctccatatgtagctctgactccgctgcgtggttccgatccgaagaacttccaaccggtaatgggattcaaaactcgttacggtatcggtatcaacccatttgcagaatccgctgctcaggctccggcttctcgcatccagagcggtatgccttctattctgaatagccttggtaaaaatgcttacttccgccgtgtatatgttaaaggtatctaatctttgacgatttaagggaccttcgggtccctttagttgtttttatggtataaataaatcatataaaccaaaaggaaagcgcaatggctaaaatcaacgaacttctgcgcgaatcaaccacaacgaatagcaactcaatcggtcgcccaaatctcgttgctttgactcgcgctaccactaaattaatatattctgacattgtagcaacgcaaagaactaatcaacctgttgctgctttttatggtatcaaataccttaacccggataacgaatttacatttaaaactggtgctacttacgccggcgaagctgggtatgtagaccgagaacaaatcacagaattaacagaagagtctaaattaactctcaataaaggtgatttattcaaatataataatatcgtttataaagtattagaagatacaccatttgctgatattgaagaaagcgatttagaattagctcttcagattgcaattgttcttttaaaagttcgtctattttctgatgctgcagtaacaagcaaatttgaaagctctgatagcgaaattgcggatgctagattccagattaataaatggcaaaccgcagttaaatctcgtaaacttaaaactggcatcacagtcgaattagcacaagatttagaagcaaatggattcgatgctcctaatttcttggaagatttgcttgcaaccgaaatggcagatgaaatcaataaagatattctgcagtctttgattacagtgtcaaaacgctataaagttacaggaattactgatactggattcattgatttgagttatgcatctgcgcctgaagctggtcgttcattataccgaatggtgtgtgaaatggtttcacatatccagaaagaatcaacttatacagcaacgttctgtgttgcttcagctcgtgccgctgcgattcttgctgcatcaggttggttaaaacataaaccagaagatgacaaatatctttcacaaaatgcctacgggttcttagctaatggtttaccgctttattgcgataccaacagcccattagattatgtaatcgttggcgtagtagaaaatatcggtgaaaaagaaattgttggatcaattttctatgctccgtatacagaaggtcttgacttagatgaccctgaacatgtaggtgcatttaaagttgtagttgatccagaaagtttgcagccatctatcggtttattagttagatatgctttatctgcaaatccttacactgtagcaaaagatgaaaaagaagcaagagtaattgatggtggagacatggataaaatggcgggtcgttcagatttgtctgttttattaggtgttaagctaccaaaaattatcattgatgaataaaacaaagggaccttttggtccctttttatttaacttaccaattcaatccaagccggacgaagtacatcttgtaccattttaactaattccttcttaatcaaagaaggattatccgcttgagttagagtaataccttcacgagaagtttcttccaaaatatcttgaaccgttagtcccatcacctttccaaaatcttttggaccaatttcaccaattttagaaataacgttatttactcggttcagtgtaacataacaagctaaaattcccagcaatttattatcagcttctgacaactcaactttagctttaataggcttatcagactttttcttttcactaaatttagagttcttgcatttgatggctacacgattgcgattaggcagccaagaaggataacaaggtttcaatacatatccttcagcggtaaatacttcgccttttgcttcagcattccaaacgcatttatttgcatcaactaatccagcatggtctaccgtaaaattataatcctgtacgacagaatctaaatcatttggcaatttaataagttcttcaaatttaccacgacctaaaagtggagccattttaaatttaaatgtattacagaatgattccatcatataatcatcgacataagttacatcaccactttctgtagtaacaataatgtcaaatacataaaaatctttatcaccataatcgacattcttctgaatgccaggtccggcgaattcaccgaagacttgataagatacaaccgctgaagtttccataatatcttgtactgctttaatggaatcagcgtaattcttcaaaataatttcatacccaaagaaatcttcagcaggaagaataggaccagtgcgtttagcacaagttactttatcacgctcaataattaatgagaaatttgtgccatgaatcttttcacgagctacccattcgccgccagtcaatcctaaactgtaaagtttttcaataaatttagagttgtaatgattttcaagactgctatactttttaaacataattaatcctcaaaatgtaatttctaaccaatcaccatcacgctgatcactattgactttaaagctaaatccttcttttctcagccaatcaccaatttcttcagtaatcaatttatcgcgagcagtacaataataactaaaatatgttttaccttgttcagctgctttattagcaagttccgaaaaatctttaataaaacactctagcttaaactgtttacttttaagtgctttttcacgtaattgattagcaaaagattcattttcataaagatcatactgttccatttttcacctttttattaatatgcctttttctatagacaactttttctcgagtttcaaatttattcttagcagtcatagctcgagcccataatacagccacttctttcgcctgtaagtttaattcacgagcaatttcaatgaatgactttccagactcatgaagagtaaacaccacaacctcagttctcataatcaatctcatgttatcgagttgatgccattatatacatcattttctgagtatgttttgtgtgctttcaaaatgaagaaaggggccgaagccccttatgattatggataggtatagatgataccagtttctaaagcagttttatgaatgatgtatccattgcgtgattcttgaacatcaacttctggatagtctttcatcatcttctgaagagtgtaacgatgcaggtagtatttactgtctggatcttcagttttccaatctttaccttcttcggtcattttttggatttcatccataacccaccaaccgcaccagatataagctgaagtacgatgtggaagaggatgaacataaggcaattcaccttctggttccggagcaactttatcagttacctgaacttggcctgttgctttaactgttttactatcatagtcggttgctgtaacgacagcagtaacttcaatagtttgacttccaatagatgaggtgtcaacggtgtatacgttagttgacccttctacaggagaagaatctttcttccatgaataagtaatttgtgctgcttcaggtgctccagtaacattagccgtaaatgtagccgaagcatcttgctgaacgttaatagaaggaggagtcaatgtaacctgtggattcattgtcttcttattaactgtcaatgatacttcattagaagtaacttccttttcattgtaattttctgcagttacttgcgctacacatttaattctttttactccacttgtagttggagtatagttaaatgtagagttagtttctccaccaatttgagaatcatctacataccacttatatgtagcagacgctccatcaggttgagaagctaaggcagcagtaaattgaactggagttccaattactccagctgaaggactattaggagttacaactaaagtagtcgcttgggttttcttgttaacagtcagcgacacttcgtcagaagtaacggtctttgtatcataatctgtcgcagttacttgagctacacacttaatttttttaactccgcttatggcaggagtatagttaaatgtagcgtcagttgcttctcccacaggagaaccgtcgacgtgccattgatacgtagcagatgcacctggcggctgtgaatctaaggcagcggtaaattgaacagctgttccgattactccttccgaaggactatcaggagttactgttattgtagtagtctgtgtcttattttgaactgtgatagttgtcgtagtttctgctgtttcaggttcagcttcagattctggaactgtatttgttgcaactactttaatagtcttttgacctgcaggtccttttagtacatagctaaaagttgcttcagctccatcctgtggaacattatctacactccaagcataggtaatagttccaccttcagtttgaccactgggtgcagcagtaaactgcttggtttcatcaataactcctgttggggttttaggagttatatcaactgtaaaagccataagttatccttattttaatgttacgaaagaagaattacgtgtttcacgaattagaactgatccgtcacgattaatgtagtaaattaagctaaataaagtttggtgtgccgacgcatgttcaaaactagttgggtgagatttccaatctggggtttcagcaatccattgataaatccaccaaggaacagtgcagaatcctggattttttccaatcagctgaagattcggactaaagttttccggaagagtaaatacagacggcttttcagattcaataatctcagctacagcctgttcgaatttttcttcaacaaaaggagtatcttcaattaaaacagtggtattttcaggaattttatccgtttctactacttcaattttaatgtcagatttaaccggagaatcaatcagaagtgctgcctctggattgacttcttcatcgtcatattttaatccgtctgcggcatcagcagcatcaattaagtctttaatagataacccatcagtctctggcataggttcactagcgagcttctggagagcttcttcaatatcattaacgatattatcaaaagatttattctttttgacctttataccaaactgttcagcatattcagctaatttagctttagcttctttattatcatcaagagccttcagctctgcaatataatctttatctatcataatatttcctcagtataaatatagatatatttattacatggtatttagacatgactgacattaaagtacatttttatgattttagtcacgtgagaattgattgcgaagaaagtacatttcatgaactccgtgatttctttagctttgaagctgatgggtatcgttttaatccgaagtacaaatatggccactgggatggacgaattcgtcttttagattataatcgccttcttccattcggtttagtcgggcaaattaaaaagttctgcgataactttggctataaagcctggattgacccacagattaacgaaaaagaagaattatcaagaaaagattttgatgaatggctttctaaattagaaatctattcaggaaataaaagaattgaaccacactggtatcagaaagatgctgtattcgaaggattagtgaatcgtcgtcgtattctaaaccttcctacttcagcaggtaaatctcttattcaggctctgttagctcgttattaccttgaaaattttgaaggtaaaatcctgattatcgttcctactacagcgctcactactcagatggccgatgattttgttgattatcgtctgttcaatcacaatatgattaagaaaattggtggtggtgcaacgtctgctgataaaaagaaaaatgattctcctattatcgtaggaacatggcagacggtagttaagcaacctaaagaatggttctcacagtttggaatgatgatgaatgatgaatgtcatcttgctacaggaaaaagtatttcatctataatatcaggtttaaataactgcatgtttaaatttggtttgtctggttcattgcgcgatggcaaagccaatatcatgcagtatgttggaatgtttggtgaaatatttaagccagtaacgacctctaaattaatggaagatggacaagtaactgagttaaaaattaatagcatttttcttcgctatcccgatgagttcactactaaattaaagggaaaaaattaccaagaagaaataaaaattattactgggctcagtaaaagaaataaatggatcgctaaattagctattaagcttgcacaaaaagatgaaaacgcttttgtcatgtttaaacatgtatcgcatggtaaagctattttcgatttaattaaaaatgaatacgataaagtttattacgtatcaggggaagttgataccgaaacccgcaatataatgaaaaccttagctgaaaacggtaaaggaataattatagtagctagttatggtgtattttctactggtatttcagttaaaaatctgcatcacgttgttttagcacacggtgttaaatctaaaattattgtattgcaaacaataggtcgcgtattacgtaaacatggttctaaaacaattgcaacagtctgggatcttatagatgacgcaggcgtcaagccaaaatctgctaatacgaaaaagaaatacgttcatttgaactatcttttaaaacacggcattgatcgtattcagcgctacgcagatgaaaaatttaattacgtaatgaaaacagttaatttataagggcttcggccctttggagaaaaagatgttactagaatttaaacaatttctttatgaagcttctattgatgaatttatgggtaaaattgcctcttgtcaaacattagaaggtttagaagaacttgaagcttattataagaaaagagttaaagaaactgaattaaaagatactgatgacatctctgtgagagatgctttggcaggaaaaagagctgaattagaagattcagacgatgaagtagaagaaagcttttaaattaaaaaaggcccaaccaaaaaggaagggccaaaactatagactaaaggtcacactatagcaaaagttgtgtttcatttaattgttcttccgaactttctgaaactggtagttctttaatgtaattatagcaaggcccaggatgtacaggacctttgtctgtttcaacaaccaatgcagaatcgattggagttttacagacaacacaaatcttatctgacatgattgtctcctctgaattatatatctatttatacaactctcatatgcatatcaatgcccatatctttagaataaaaatattcatcaagatatccggcaaattttcctttaatataaagaacatcttcaccgcacgggtggtcggccaggatacgaatatcctgacgcttgagattatactttttcattaagaattgaatttccgtttcaaattcttcttcataattaaaagcatcatcaatgctatatctcattattttccagcctcaaatgctcgcatgtcttgaatgtgcttaatagcaaatccgcgtgatttgatagcatcaagagctccgctacagaaatccaataaaattccccaatattgtaatgaagtatcaacttttaaaacatccttatcagctgatagaactgtcttcatttctgatttctcataacggtccatactaaattcatcaccatctcctcgtcccgagtagtagtctaatttagctttaagagcaacttttttctgtgcatcaattctaagcatttcctttttaatacttgaatgcttattgagccatttactatataacatcacattattagctgcttcatactgtaatttagtcgaatctataaacacatctttcttcaattcttcttgaagatcttctaatctcatattgttctctattcaattgttattggatggacttagattcattataccacgtttatacgtgaagcattatactctattactggaagccagttgtagttttatctgctcaatatcatcagggttatcgatgactgaaaagcgtatttctactatcaaagtataatcatcataaaccggtattacattaactgctaatttatcaatacgtggctcatagtttcttactgcgctttcgatattacgctcaaccgtgtcagcagtaagaggagtcatattctcaaaaagttggtcagataaatcgcatccaaattcagggtcaaacggtcttgaaccttttcttgttgtaataattcctaaaagactatttttaattgaccttaatccaagtgatcttgaaacgtctttgttccaatccattttcatctctgggtcaatatcagaataaagcttattaatatttgccattacaatagctcaaagaattctttgagtcctcttattacatgagcgtgggtttttccacactctggacacttaattggaacagccaaataaacagtaggctttaaaagcatatcttttatagctacaatatctgactctgtgatgatagaatataaatcttccaattctttttcatttaagtcttcaactggaatgctttcaccgttagcatgaatcgtttctatacatgatactatcatgtgggctatatttttatcatcaaaaattttagggtaatggaatttaattttaatgtcacccagtgtataccagaggtcttctggtgcatctatttgtgtatgtaatagatttatatgggttggtatttcagttccacaggtgcacttccaggagttttcgtgattaacttctccaagagaatgcgcccataaatgaatcagtaatagttctgattcttggcggtttaaatcttttgcatttgtacagtctttgattagctttttaacaatctcttctactgaaccattctttttagcagtaataagttctagatattctttaagagtaaatgcgcgacagttgattattttagacccaactctcacatcaaatttgtattcatacatatttagctcctttatttatcatatttataaatagaataaaaggagcatctatggcaaacattattcgttgtaaattaccagatggtgttcatcgttttaaaccatttacggtagaagattatcgagattttttgttagttcgaaacgatatagaacatcggtcaccacaagaacaaaaagaagtaattgctgatttaattgctgattattttggagactatccaaagacttggcaaccgtttatatttttgcaggtatttgtaggttcaataggtaaaactaaagtaccagtcacattcatatgtccaaaatgtaaaaaagaaaagacagttccatttgaaatatatcaaaaagaattaaaggaacctatttttgatgtagctaatgttaaaattaaattaaattttccttctgagttttatgaaaataaagcaaagatgattactgaaaatattcattctgttcaagtagatgaaatgtggtatgattggaaggaaattagtgaatcaagtcaaatagaacttgttgacgccatcgagatagaaacattagaaaaaattctcgatgcaatgaatcctattaatttaacattgcacatgtcgtgttgtgataagtacattaaaaaatacactgatatagtagatgtgtttaagctattagttaatccagatgagatatttactttttatcaaattaatcacacgcttgtaaaaagtaattatagcttaaattcaataatgaaaatgattcctgccgagcgcggattcgtattaaaactgattgagaaggataaacatcaatgagtatgttacaacgtcctggatatccaaatctcagcgttaaattatttgagagttatgacgcttggagtaataatagatttgttgaattagctgctactattaccacattaactatgcgtgactctctttatggtcgaaatgaaggaatgctacaattttatgattctaaaaacattcatacaaaaatggatggaaatgaaataattcagatttctgtagctaatgcaaacgatattaataatgttaaaacccgaatttatggatgcaagcatttttccgtgtcagtagattcaaaaggagataacatcattgctattgaattaggaactattcattctatagaaaatcttaaatttggtagaccatttttccctgatgccggtgaatctataaaggaaatgcttggcgtaatttatcaagatcgtacattattaactccagcaataaatgctattaatgcttatgttcctgatattccatggactagcacatttgaaaactatttgtcatatgtaagagaagttgctctagcggtaggaagcgataagttcgtatttgtatggcaagacatcatgggagttaacatgatggactatgatatgatgataaatcaagaaccatatccaatgattgtaggtgagccatctttaataggtcaattcatccaagaattgaaatatccattagcatatgatttcgtttggttgactaaatcgaatcctcacaaacgtgacccaatgaaaaatgctactatctatgctcattcatttttagattcttcattgccaatgattactacgggaaagggcgaaaactctattgtagtgtcaaggtcaggtgcttattctgaaatgacttataggaatggttatgaagaagctattcgtcttcagactatggcacagtatgatggttacgctaaatgttctactgtcggtaattttaacttgactcctggtgttaaaattatttttaatgatagtaaaaaccaatttaaaacagaattttacgttgatgaagttatccatgaattatccaataataactcagtaactcatctatatatgttcactaatgcaacgaaactggaaacaatagacccagttaaggttaaaaatgaatttaaatctgatactaccactgaagaaagtagttcttccaataagtaataaagaagtttctattcctaaaatgggtcttaaacattataacattttaaaagatgttaaaggtcctgatgaaaatttaaaacttcttattgattctatttgtccgaatttatcaccggcagaagttgatttcgtttctattcatttattggaatttaatggaaagattaaatctcgtaaagaaatagatggttatacttatgacattaatgatgtttatgtgtgtcaaagattagaatttcaataccaaggaaatacattttattttagacctcctggaaaatttgaacaatttttaactgtaagcgatatgttatccaaatgcttgcttaaggtcaatgatgaagttaaagaaattaattttcttgagatgccagcatttgttttaaaatgggcaaatgatatttctacaactttagcaattcctggccctaatggtccaataaccggaattggcaatattattggattatttgaatgaaaaagccacaagaaatgcaaacaatgcgtagaaaagttatttcagataataaaccaacacaggaagcggctaaatccgcttctaatactttatctggtcttaatgacatttctacaaaattagatgatgctcaagctgcctctgaattaatagctcagactgttgaagaaaaatcaaatgaaatagttggagcaattgataacgttgaaagcgcagtaagtgatactactgccggttctgagttaattgctgaaactgttgaaattggaaacaatattaataaagaaatcggtgaatcgctcggaagcaaattagataaattaacaagtttactggaacaaaaaattcagacagctggaattcagcaaactggaacgagtttagcagtagtcgaaagtgctattcccgttaaagttgttgaggatgatacagctgaatttgttggtccattattaccagctcctgaagcagttaataatgatcctgacgctgattttttccctgcccctcaaccagttgaacctaagcgagagtcaccggaagaaaaacagaaaaaagaagcatttaacttaaaattatctcaagctttagataaattaacaaagacagttgatttcggatttaagaaatctatttcaattactgataaaatatctagcatgctatttaagtataccgtcagtgctgctattgaagctgctaaaatggttgcattaataatggctgttgttattggaatagacctactgatggttcattttaaatattggtcagataaattttcaaaagcctgggatttatttagcactgattttaaaactttctcaagcgaaacaggaacttggggtcctttattacagagcatatttgaatctattgatgaaattaaaaagttctgggaagctggagattggggcggattaacagtagctattgttgaagggcttggaagtgttctttataatttaggagagcttattcaattaggtatggctaaattatctgcagcaattcttcgagttattcctggtatgaaagatactgctgacgaagtagaaggaagagcactggaaaatttccaaaattctactggagcatctctcaataaagaagaccaggaaaaagttgcgaattatcaagataaacgaatgaatggagaccttggtccgatagcagaaggactagacaaaattgcgaactggaaaactcgtgcatctaactggattcgtggtgttgataataaagaagcattgacaactgatgaagaacgcgcagcagaagaagaaaaattaaagcagctttcaccagaagaaagaaaaaatgctttaatgaaggctaatgaagcccgtgccgcgatgattcgttttgaaaaatatgctgattcagctgatatgagtaaagactcaacagttaaatcaattgaagccgctcatgaagaccttaaaaaacggatgaatgacccggatttaaataattcacctgcagttaaaaaggagcttgcttctagatttgctaaaattgatgctacttatcaagagcttaagaaaaatcaacctgaggccaaacctgaaacttctgctaaatcgccagaagcaaaacaagtccaggtaatagaaaagaacaaagcacagcaagctcctgttcaacaagcatctccttcgatcaataatactaataatgttattaagaaaaatactgtcgttcataatatgacacccgtaacgagcacaactgctcctggtgtatttggcgcgactggagttaattaaggaataatatggcaattgttaaagaaataactgctgatttaattaaaaagtccggtgagaaaatttcagccggacagagtactaaatcagaagtaggaactaaaacatacacagcccagtttccaactgggcgtgctagtgggaatgacactacaggggacttccaggtaacagatctatataagaatggattattatttactgcatacaatatgtcatctagggattctggaagtctcagaacgatgagatctaactactcttcttcatcttcgagtattttacgtacagccagaaacactatcagtaatacagtatcaaaattatcaaatggactaatatcagataataattcaggaacaataagtaaagttcctgttgcaaatattcttttacctagatctaaatctgacgtcgatacgtcatcacatagatttaatgatgttcaagatagtcttattacaaaaggcggaggtactgctactggtgtgctaagtaatatggcttcaactgcagtatttggtgcgcttgaaagtataacacaaggaataatggctgataataatgaacagatctatacaacagctagaagtatgtatggcggtgctgaaaatagaacaaaagtgttcacctgggatttgactccgcgctcaacagaagatttaatggctattattaatatctatcagtattttaactatttttcttacggtgaaactggtaaatctcaatatgctgctgaaataaaaggatatttagatgagtggtatcgttctacatttattgaaccattaacgccagaagacgcgattaaaaacaagacgttatttgaaaaaatgacatcgagtttaacgaacgttcttgtagtttcaaacccgacaatttggatggtgaaaaactttggtgcaacttctaaatttgatggaaagactgaagtattcggtccatgccaaatacagagtattagatttgataaaacaccaaatggtaactttaatggattagctattgctcctaaccttccaagttcttttacactcgagattactatgagagagattattacgttaaaccgtgcttctttatatacggggactttctaatgtattctttagaggaatttaataatcaagcaataaacgcagacttccaacgtaataatatgttcagctgtgtttttgctacaactccatcaactaaaagctcatcgttaataagctcaattagtaactttgcttataataacttgggtctaaattcagattggttgggattaactcaaggtgatattaatcagggaattaccacgctaattaccgctggcacacaaaaactaataagaaaatcaggggttagtaaatatcttattggtgccatgagtcaacgtacagttcaaagtttattgggttcatttacagttggtacatatttaattgacttctttaatatggcgtataattcatctggattgatgatatactctgtaaaaatgccagagaatagattatcctatgaaactgactggaactataattctcctaatattcgtataactggaagagaattagaccctttggttatttcatttagaatggattcagaagcttgtaactatcgtgcaatgcaagactgggttaacgccgttcaagacccagtaactggattgcgtgctttaccgcaagatgtcgaggcagatattcaggtcaatcttcattctcgcaatggattaccacatactgcggtgatgttcactggctgtattccaatatctgtgagtgctcctgagttatcatatgatggagataaccaaataactacatttgatgttactttcgcttatagagtcatgcaggctggagcagttgatagacaagctgcccttgaatggcttgaatctgctactataaatggtattcaaagcgttctcggaaatagtggaggtgttactggactatctaattcgctttcacgacttagtagattagggggaactgcaggaagcatttcaaatattaatactatgacaggaattgtcaactcgcaaagtaaaatattaggagcaatataacaatggggaccgaaaggtccccatgtttttatttacggaatgaaataaaagcagcaactgaagcaacagaggtttcttcaatataaacctcaatttttaccggagcttctgactcaaatttacctgttactacaccctgaaaaatactttcagtctgttctggctttgaaaaattttcagaaggaaaaattccaaactttttatcggttccgaaaattttaataaattcatcgtaaactgcttcattaaaagcattatcagcaggaataacgccttcaactacaagttcttgacctaaaaagcgcaaagaagatttcattttgtgttcctcatgttatatcagtaagattactataacacaacacgagggacttgtaaactacattttgaactttttagacattccgttaatgttaaccaaagaagctaagatttgagaaacttcgttttcctcttcttttgattcttctacaaggaattgattaaactcagccattggacgaacttcgccagtttccattagatgatcgccatcatataccgattcttctaattgttcagaaggaggaacgattgtgccttcgattagatacttgttataagcagtttctttcatcatgtacgtgcttactttattaatcttcagcaaaattccacgcggtagaataacttcagcttctgatggaaatcctgataaatgacctggaacgataactttgattcgctcagcccctttaattaccatacctacgctagcttcagcatcttcattagcatatgcagaatgactgcccatatgcatcaaatcttcagcatcaacagaaccttctccttcaccagaaaatactgcgccggaatcatctagagccatatagtttttaccatgctcaccaaagatatttggtttaagcgatgttgatacgaagttcttgaaatagaacattttattttcaatattatggcgtaaagttttaaaagtaacttcttgtccacgataaagcgtagttcccggaggaagaactgatcctttggcgaatgcagaatccagcgtctcgatgtgtttaatagctcgttccatgtattcttcacgggtagaatctggtttacccaagaggaacgagttcatttcaacatatgaatctgcacaataatcttcaattacatcagactcagcctgagttaatccttttggagttacttcggtgcttgcgtattcatatgcctgagcagcagattcattaatcaatttataaatgccattcatgacaaattgaataatagctaccttttcgtctggtgtggctttagaacctttaactaaatcattgataattttcttaataacatcaaagctattagaaatattaatgtcagcgagatcgctcaaaattttatcggttttataatcaaagaattctttattctttaaatattcttgagaaccttgatatgttatatcgctctgcagtctgatagacggatcgcgtaaacgtgcatgggccaatgcaatatgatttcggaagctttctagttcataatcgttagatttaaaacgagaagcacttctcataccaccgatagctcctttgctgaagtttgaaccaatctgaataacgccagagttcattggtccttctgctttatataccggaactttagattcaaactcttgatatttcttagcagcgaagctatcaccctgaagtgaagcatcaacagtagaatattgagcttgtgctgctaatcgacgactaattttagttttctgaataacagcttgatccgtgcgcttatcattttctaaagcaatagaagcagcaacagcaacagctttaggaacagcattacctgttttaacatctacataaacatcaccaacctttgattcaacttttgtgaataactcagttgaaataggaggtacacctggaatgtcttctaaattggcatttttacggtaaaccataatatatgcatatttcttatcatagtcccagatttcctttaaaagaacatatcgacctgctcctttagtacgtactaaacggtcagcaataacttgcatttgacgagcagcgccgtttgttttactttttagtacgcggaataggcatgcatcaattttatactgtttcattgtttgaagagcagtatcaaaaaccgcattaatgacgccaattggatttccacccaagtttttaagcttaactaacgataatttctcgttgacgcctatcattacgatatgcatcattttgtcgcctggcttaacgtttttattcgtatcaccgccagaggtgtatgtacaaaatctaaatccaggaagcacgctttcttcaccggcttgaatagcaaaaatttgtggtattttatgcttaggatttaagttaacaaccggcgccgaagcgccgtcaaataattctgtaataagttccatgatttatccttgaacgaacttgtaaggcatgtttgcaatatctatacaagacgcaataattccaagagatgattctactttctgtttaacatttgatgaaacaaatgatgcaaagtcaactctgtcttctacttcaatatcacctgtcattgcaaccaattcaccagtttccattaaatggtctccgtcatagattaccgattcggtgagctcttccgtggtcataacttcagcttgaataagcttgttgttagttttaactgttccatcattgtaagatgcatcagttattttattaactttgaccattaatccacgtggcaaaataacttccatttcatttgaaggcgctaaacttccaccaggtaaaacaacattgactttatcagccccagtaataacccatccaattccgactaaattatcgctagaatttacaagcccttcatcatttttatcgatagaaatgtttagacgcttttcatctggtaaaacaccaacagctgaatcagtcatccaagtaccaaaaatgtttggatataatgatgttgatacaaaatttctaaaataaaaaactcgattttttaccaatgcttcatatattgaaggtaacattcgctgtgaacgatataaagtaataccttttggcaatcgatcaccatttttaaaggctgaatctaaattatcaatagctttttctatgtcagatgctgtcaaaatacttgtacgctcatctggattatataatcccaaaagagcattatttatgtctacatatcctgaacctacgtattcacgaattccgcgtttttgtgctggtgtgtatttagatgaatctttattttcgactataggatgtaatgaccatccagctgtaagagcatatccacgtaattctcttcgaataatctttgtttttattgcattccaagaattttgtactaactcatttgcagcatcttggtttaaatgcgaatgtttgttaatatttctttcaaaccaagcacctttatatttttctaaagtatcatcgacgatagaagcaatagtttctaaagtttttattgaagtaatagattcttttcgtaatttttctaaagctttattttttatttctgcattaataatggattctttatcttcaggaattatagaagcttctctgaatgccatcccagctgtaacactgctaagagcattctctagtgcaaatcctgaagtagaaattaccgttaattcattagaatcagaaattaaaggcgcgtccgctggtttatttaattctgccgctgaagcctcaaatttttgaaacatcggtgtttcaaatctagaagattccaatgactgactttgtgcaattgctctacgggaaattttaactttaacgattacggcttggtcagaacgtttatcattttcttgtgcaatagatgcagcaattgcctcatttttggttacttgagctccagtatctttattgatataaacatcaccgaccttcgattcaactttagtaaaaagctcggtgctaatttctggaactcctggaatgtcttctagtgatacatttttacgatgtataagaatatatgcatactttttatcgtaatcccagagttccttaagaaggacgtatctgccacctgaacgactgcggatgagtctatcagcaataagttgaatttgtcgagcttgaccggcggttttagacttaagaatacgaagcatgcaggcatcaattttatattgacgcattgtttgcattgcaacagtaaaaactgaattgatataattaattgggcttggaccaagaccttttaatttagcaattgaacctttagcagttaatgtaaaaggaacaatgtgcatcattttgtcgcccatttttaaatcgcgattagtatcacctccagatgtatatgtacataaacgaaagcctggttgttcaattgcatcatcaacatgaactgaaaaaatttgtggtattttcttctttggatttaagtttgtaatcggaagagtagtatcttcgtcaaataattctgtaataagttccatcatagcctctctagtgtttattctatttataaaattaaaggcccgaaggcctttagtaatctagtggtaagagagtacgatatatttcaaactttggtcctttttcataggcatcaaatgtttctgtaaatttattgtaagcatatgcatctacaaattcgagaatgacttgtgatacagaagtagaaacatctccaccttctttttgagcaatgacaattgtttctaagtaagctttcataaaccagttacctcatgaaaatcgccaaatacatcctcgaatgtattagctttagttttatcttcacgtaaacgaatcgcaatcggaagaaataatttaacgtaatcagtgcggccatcagattttaaccaaccgttgcattcgcactctagaatttttccaatataataattttggttttccataatgcgagtacggtcaagttcatgcgattttacaccagctttatcttttaagcctgaaccagcatttactttaatttttccacactctgattcaagaataaatccacctgctttagtagggtctttacggtgaggataaattcctacaatttttaaatcaacatcaattacttctttaaatttatagagattttttgaacgagcattttcccataatccatcggtatttttgagaataataccttcaagaccttgatcaatatactttttataaattaccttagcttcatctaggttatttactacctggttttcaattaaaattactttatcataacctgatgtcatttgttctagtttagaaaaacgtacatcatatttcaaacgaaatgcaggaagaccgtatatttctaccaacgggacataatcccagacctgaaacttcatgcattgagcttctttttcagaaatggttccctttaaagatttattggcgatgccattagatgcagtacgagattcagctacttcggcaaactctttagctttactgatttcaggagcatcaaaaagaaaatctagaccttctggctctttttcaacttgctcatgatataccaattcgccatcaattaacacgccttctggatgaatctggcgggcttcagcggtcattttgattaactcttccttaagaagatctaatcctagatattcattaccagctcgtgataaaagacgaacatcatctaattcatcacctcggacttcagcaaaacaccgagctccatctgcttttaactgtgcaaaagctggaaatttgatattcttactaatgcctttttcatcataagaacttgccaacatttgaggttgttcaggaattaaacctggccaaactttatttgcaatagatactgaagcaccgcattcaagatctcgcatcatcacccgacgcaaaacttcaacatcatcttttttaccgtcagtaatatatccagttaattcctcaattgccgcatttccagtcaatttccgagtagctaacgtgaattcaatgaagtcaagcatatcggtaagagtcaacattccaaaactctgggtagcaatacccggtttaggccatttcttgatataatactgtaacccacgagaataagtcagacgatatactcgtttaagcaattcattatctttattcttttcaagaattgcttgcttctgcttagttgaaccaatagatgctatttcgttcagaattttaagaatcattgttcatcctttagagtttggtttacagctctattataaatcaattcatcattaagctcagtcaaagacctgtggtacgtggttctaactttatttccttgcatccagtgcttgacgtaaatgaaaccttgctctacacattttttaaaaattcgttcgtctttttgagctcggaattctggattgcatctaaaaaattgatttacgtgaccgtaatcacgtgtagtattaccttcattttcataaatagtgtgaacaacaaacattagaatgctccttggaaaatattatcaccactaccactagtaagtctattaaaataccctgcgtcgccaggcttaatataactccacgtatggaatggatgcatctgatgtgagtgtgtataatatggatgatatggattataaggattaaatccaggagttctccaagtagtgttccaacgaaaagaatcgtttttgatcatcttctcaattacatcttttatagctttttcactatcaaaactttctttattttcctttggtgaaaaaagcttattttctacatcattccatgtataaactcgctgtgcagtttttggaatactgtcacgttcccctcgagccatccaataaacaggaacatttaatatttcactcgcatgatcgcaatggtgagcgagatcgtcaatataacaaattacgttatatttttcttttgcctttttgaacaactcttcttttgaagaatcatgaccacacatcagtacttctgagaaggcaccaggaaaaagagcattcaaattaaattgacgattcagcagagcgtcaatagaatcacccaatgctgtaacagctacaaaattataatcttcttttaatttgttaattacacacagggcatctttatatggagacaagtatcgaataaaatccgaacgattgtatttttcaattagcttaacgccaagttcttcatcgcaattaaatagtttaccaggagaaataaatttctcatcctggatcatttttaaaatatgttctaacggaagattatatttctgggcaaaataaggaagacctgattgccagcttaaacatactccatcaatatcagttaaaatagtaggcttcatagagaatctcttaataggtttaacacattaataaattcagcttcggttagtattgtatcatcttttgttagaccactagccatgctgtgcttcaaaacttttcctttcgaggcttgtaatgcatcacggaagcccttgttttggatcgctgcttcaaaatatgcatttgtgtataattctttccacgccggggagtatcttgaaaatggaactccaagccagaagagggtcccacggtcctgagctcttgcataagaccttccagcttgttgggcggcaagcccggataacccaaatatacgacgttgttgttcaacatttttcaccttgcacccttggaggaatccttcaagacctccaaattgaatgccatccataacgaaaggccattgggcgaaattacttaatgcgcatgatggccacctaaaattgcttctaatctctaactcagacattttcaatgcttataatttcaacatcagcccaatgaccatagtttggtagacgaaattcaactggccagtcactgcctttttctaatataatagacttaacttgcggttcttcgtgttcatcagtatacggatttttatctgttactttatatgtgaccttaatgtactgaattccaaaaatcttattaattatattcatactaattcctttaatccgtagataggagataattcatcgcccatacgaaggtcttcatttccatctacccaagaaacaatataagcctcttttatttgaataccactccatttaaacggaggtagaaccttagaaattaatccaggtataccaactccctttaattcaacggtttgacctaaaaagaatttcattagaacctcatctgaaacccatgtgatttaacattaccgccgccaatatcagaaatattaatttcacgcgcaattgagggatcaatgtcaatttcgccattaagtttaatgatagacaaagtatcacgcccatttacagtgcgaaactctaaaggacaaaccacatcaacataatttttaatcgattcactggtaggttgcaaatgagcaggaaggtctttaggcgccttagagaaaacaacttcacagaaatttttgcgggtatcaaaataagtagtcataaacatagtattttcctcagtaaggggccgaagcccctgttttattttaaatatcaaattcgttaagaactacatcaaagattgcttcaagatgctcaggtttagctctgttactcaaaatatgacgaatccaagttttaaccagaagcttacgattagcgccattccagcaaggatgggtccctaaatcgcgttgacgaaaatcatcatccagagcgattttgaagttggaaccttccattgtgattgaaaccgtgataccgttttcaaatcgcatataaacgtagttaggagtcatatactgttcaatttcgcatactgatccattttgatgtttccaaaggcaaatagtatcaatagaacctgcaataccattagaaacatatttacgttcaaagttgatgtagttcattttattctccaagatgtttaattgcggtacagatatataatatcatatcctgtaccaaagtaaacaattattttactactttccaatgctgcatatcaagtttaccaacttttttcatcttctcaattaagcgttcggcacgttggcgagctgtaacataataccattcacctaattcattttgttcaatttttccaacgattactgtattcaattcataaatccaaccagtaaagaaattatgaacttgaattgtaaaggtgaaatctgttcccataccttctgttgtttctacttcaataatatcaccttcaactgccattaagaaccacatagtttcatcatatttaccattgaagcatttagttttaactgcagcgttcagattaatcgttttcattttattctcctttgtttgtgtaagataatactatcacaaaggaaccatactgtaaacaactttatgcaatctttggaaaataaaaaaggactcccgaaggagtcctcaacttatgctttctgcttaccaaaacgagaagcatcatctcgaagaaccgcacgtgctcggcgcatgatcttctcaacagtttgattgatacgagagttcgacccacgcttgtagccagcgcgtttagaatcaccaactttcttttcaactgctttctttgctttagcttgttttgccattataaattctcttttaaatgaaaatgcaggacttattggcattgcctgcgcaagccctcaaggggaacataggtttttggatatttaacgaccaggataaccataaacccgtcatcataccttatagctcttatctgttgcacaccgttagcttaaaggttccgggttcgatttctcgaggataagatatatactgatggatatataggccttgaggcgtactcccgattggccatcacctcggggtagcatgcacttgccgctataagaataacattcaagaggtacaccgtaaaactgccggggtcttaaaactataatgattcgcaaatcattaatcagacagttcgacggctcctcgttttaacttcacactaaggcagtgactctccaataaattacttcagtgttaccacaaagtgacgaactgcttttcgtgcagcagaagccagaggcttagcatatttaagttcatctttttcctgaagctcagcagctaatgcagtttgagcaggattcagatgtttgaaataacgcaggatttcaagagcttcggcttcaacatcaatagatgcgccatagttttcgtgaccattattccatgcgtttcgttgcagttcaagagcgtgttgtaattgtttaatcatttaaaaattctcgttagagattaaaactcggtagtcacgttcttctgaatttcatcttctttcgacagatctctcagttgtagactaccacatagaattgttcggttaacttattattccgacacccaattcatattattatttatatcacttataaagacacggaatagctttatagtgacaggtaacgaatttttgtttaatttcttttggctgcttaagacccagagctacaaaagggtgtggaacgtttcgaatttgaccaactggaagagaagtcaaatcaccaacttcacagaaaccttcaggaacatcaggaccgacagagtgaactacacacagttcaggaacttcaccttgaacacgtttaccgataataagtcctgattctgtaacttcttcatcaccggcttgtgcaggttcagaaactaaaataacatattcaccgacagcacgaattggtagctgttgtacttcagacatcgtttttcctttttgttaacagatgaattaataataacaaataattcttaaagcatttatttaccaataaattggagcaaatgctcaactttcataccattaacggaaatcaatttgtcaatagaaaaacctcgccatgcaccaagttcaacatcaaatactggaatcatatcagtagattctttccgagtagattcagtcaatttaccagtttgcatggttggcataaagtcagcatcgcgagtacctttcataacacgaatagtaccatcagacttttcaaaaactacgtttgaaacacccatggacaatttagttttcaaaatttcacgaattgctactttttgttcagtcgtcagtttcatttatttacctattacagttttaatatgagttgttccacgttctttaagagtggaaagtaatttttggcatttttctaaatcagatttccaactatgtggtctatcaatacaaacccagtttgacttataatactgcttccatttagagaaaaaatacttcttatactctacagcaaatgaaatgttctcgttggaataagaactaattgctgtgagctgtaccaaacgaaatttcattattcaccacagaattcgttgatattttcccagtttaacttatttaagtttttcttaggaacattaaacacttcaatacctgcatttcgcagaatatcatcccagccaggtttatttttatcgtatgtttcacaataaaccagctttttaattccagattgagctattgcttttgcacaatctgggcaaggagaaagtgttacatacatagtagcaccttcaatagaagagccatttcgtgcagcaaacaaaatcgcatttagttcagcatgaatttcatttttagacgaccattcagagtgcgcgctacgatgttctttcgccaatacaaaacgatcagttgaaccaaacgatacacattcaggcttatgaccttgaatgatagtatgtttaggcttattcagcaaccaaccttgctcagcagcataatcacagcagttcacaccacctgcaggtgaaccattatatccagtagaaataatacgtccattcttttcaattactgctcctactttccaggagcaacattttgattcttgtgatactaaatatgcaatttgaagtactgtactcgctttcatttcataatcaccagataagcagatttagcagtttcaacacgataaatttcgtgacgaagtttagttatacttttaataacagaactaattatattctgcccatctttaaagcggtttttcttatcaataaaaattgcgccaaccatctttttgtgaagctcaaccggatacttcgtcacaataatagcatcatacacagaaggatgaatactattcaccagagtatcattcattaaagttattctaatgaactttgctgtttcagagtcaagcgctctatgatcgccagtatcattttcaagacaattatcaattatatcagttaaattcatcatagtacgccatacaccctttgtgcttcaactaatccatcaaaatccaatttgagatgtgttatttggtcaccatcacctggattcacaattactaataccgaacgaggagtttcggtaataacacgaaccgacgtttcaggaaatcgttcagaaaccttatttaccaattcttgagcaaatagtttaactttttcttggaattctttaacagtaattggtttttcgcttagcatgttgatcctagctccttactttcaacatttttaactaatttgacagaaactaattcagcatcttgggtaatcattaccgggccttcttcatactcttcaagatattctagagctttgtttttagcttcttccttcgtatcagtttgagcatagatatagaacatacaaccagtaatacctactactttccacttaatttctttatcagttttaatttcaaatttactgacagaatcatctttttgaacttcttcgaaaaaagaatattctaacatataagcaattgaaaataacgggctaactttataggattcgcccattacatcaacagctttataccaacagtcatcaatttcgcgtttaatgctaataacatttttcgcaggatctatttttactttaaatgaattttccccaataaactgggcaattcgtttattagccccgcaagtttcattaaaaatatctttatacccagttttaaagcgataaaccttatcttcttcaaaccattcgctcatttcaatttcctcgtttgttttggtagagctataatatcacaactctaccgtaaagtaaactattaaattgctttgaattctgatgtctgtgattcaaaacgaatgtcgcctttgataactagctcagcatcaagaccgaatacaacaatgatatgcgcggaacctggatacaacgtgatggcaacagaatccacctggtctggaagcaaagtgttcaatacatgagtcacttgagcatgaattcgaagctcggctgcgttatcaagcttttcaaacatattattagcgataatttgactaaacactacttctacaattttagaataagtcggaaacatatttacctcacataattttcttcgagccaatcaataacatccaacgcattatcaaaagttgaaccatctactttgtcttctgtttcataatcaagaacatctaaacctactcttccatcaacaataggccataaacaaaatagatatttcttttctttttcaattttatcacaaagacgataaatcttttctatgttattcataagttttccatggtaaaggcagtttagttttctttactgttagttcaacatcaggattcttttctcttaatttaagacattcctcccatgctctattttcactagtaaatacacaaaattgcccattactagtaccaactaaaccgctatttacaataacaatagcccaagtttcatggtgcaaagccattaaaaatctcccgaggcgacttgccagcattcaacaccgatgcgtcgccacatttctactacttgagttcggtcatcaatagctaatttcacatcaaaatgtggtgcaatgtgtttccaaaaaatttcttctttaactacatcatctttacgggtatcaccttgttcgcgttgacattgcataactaatggaacgccagcaatgtcctcaacccatttacgggtcatacgataatattttgttgagtcttcttcagttccactttcacggcctgaaacgactacgatgtaatatccttgcttatcgtacatcttagctagttcaacgaccattggattaataatatcggtatcgcatttttcaaggtcataaggaccacgaccattcatttttgctaatgtgccatcaacatcaaaaataactgcttttggtttaccaggagtcccattatatactggaagaccgagatattcccgcatgcttttatacattgaacgtaaaacatcaattggtactgctttagttccgcgttttgagttgcgtttaaccaattcagtccaaggaacatcaaacactttatgttcaatttgatgcccaagctctttggcaaactcttcccaaaccttacgtcgttcaggattcagattagtatctgaaacaattacacccttcgttgcgtcttggcagagaatcatgttagcaacatcatgctgcatgtaagttacgataccttctttatttttggtatacttgtactcatcgcgttcttcatgtgccataatagattggcgatagtcatcacgattgatattataaaaccctggatttttagcaataaattcacgagcccaagtactcttaccagaaccaggacagccaatagtcaaaataatctttttcatcatttaattcctaagaaaacttcaagaatacgaatattgtgctcacgccgtcctttgtacaattcagctgttgattgattcgctgatttactctgaacattggatgaaataaattttatcatgtgatttttaagctgatacatatcaagcccacgagctttcgcttcttttcgcagggctttaccagcatcatctaaagctttagcagggtcttcatcatttaatactattccacgatccaaatccatgtatactgcaccatgacatgcatcaatgtaaaggtctgagcattcaatataacgttctagcagagttttcatttatttttctcaactaatgattgaatataatcatgcaggtctttagatgctttaccccacttattttgatattcatttttgagattagcacgggattgagctaataaaacatcattagttggaggtaaagattctaaccgctgaatctggcgtccataaatcattgcagccatctcggattcataaatcaatcctttgagatgttcaaattgatgccatgaaatcatttacatttatcctcttttaactcttgacgataataacatatcatagttttttggtcatgtacatatcgttttacatcattaagccaaatacgaaattcctgggaatcttcaaatggcataccgacccaagctttaccatcaataactttaacttgccaagatagtttagcttcatcatatgactttatctgtacaggccaattaggatgaactgtttctttctttacttctagaggctttgtcgaacaaccagctagaagaccgatagataatattactgctgatagtctaatcatttagaaaggtcctggatgtcttctgcgaacttgttgaaggagttgttgatttgtttttcaaccaatcctggcttacgagccaccacatccgccttctttgcatctttgcgcagtttttcattttcacgctcaatagcagcaatcgcctcacgatttttattattcatcgcatcaatataattatactgaattcgcaaattatttaatgctaaggcgttttcattggccgtttttgtaatttctacaacagacgtttctaatctttcaattttattttttaaaattaaagaagttccgcctaatgcaattacaattaatagcaaacctgctgtcgtattacttaattgcataaagttttaataacctctataatatcgtcttgagaaagaccgttaattaaaatatgatgttcagccggagatttagaaattttaaagcatgcctcaacatcttctgccatatccgatgcgctacgatttggattactaattccaagacgatgttttcccgttaaaggattaacgatgatatagcatttacagttgttaatatgaacattaggttgagtctgattaatgaacacatcgcaatcatatttcgcaagctgattttctaaaaagactttcatctcctcaaccgcatcaggaagcatatcacgggcttgctcaagacgacgatttcgatattctttaatggtcgttttccgcttgacttgcttagctaaatctttcttaagatcggtgatatatccaactcgacgatttcctttgaatacagaaatcccatctgtagtatcaccgtatgcttcaacgaccatttcagtagtaataagctgcaaatccatcataaagtcctcatgttatgtcagtaagactactataacacaacacgagggacttgtaaacagcttagtatccttctgggataaattttttataatttttcaaaaaattctgttcgatttcgcacatgaccttttcttgactatcgtacccctgatataggctcataatgataccgaacaggtgatccattccagcacctttagcaacgccttgcgcttccatcgcataagtctttctatctttaccgcaatgcttattgtgacagtcaagaactaaaaacagagctcggtctaagtacttcagataagtcgtctcaaatgcttcaatttttctatatgaatattcatcgtcagcgtacattgctttaagatcatctgatgcaccatcaataatagtcttaaacagtttttctggattgtctaatgagctttttgtactatgaagagacacgtaccagtcagacttaattttaaaatgagaaccatctttcatcacagcaacatagccttcgatgttttctgcatttttagcttcttctacccatttaggactatcgatttcgtatcgttcaactagatacggacgaagaatagcatctttataaatatcatcatatgaaatgtattcacccgtttcgttttcacgaacattcaataaaatgattttcatctcttgataagcaagaacgattctattagttggagcgacgaattcgaagttagcagtaaatccatcttcggctaattctttaagtctatcacgcaaccgatggtgattaatattcatcaaaataccattagccattaaagcctgttcggatttgattgaaccctttgatttgaacagaatttcatcaccatctaaataagttgataccaaagacccatcttcctttgtcagaatgtaatcaacatcatttaaatcgatattcatcgtgaatggattttcatttaagttaaaaaacttttccataggacgagaagcaattcttactggtttttctccatccatttcaaacatgattccacgacattccaatgcgtctggaagtaaccaatcagaataagatgcataattatatgagaaaattctataagttcttccagatgcacttacatcatccgagtaaaaaaacttacgctgtgaatccttacatagttccattaaattgttaaaaagttcttgcattgtgtatcctcttttgtgttttgaatatagtaccacactccatgtggaagcatcattttttcttgtgttgaatattccaaggcgggttaaacagtttaatgaatagcggctcctctaggtcaatcgttgcgattgtcattgtacctaactcatttgtcatagaaagattaaaacattggcgggcgtaaaattcaactttgcttccttcctttagcgcagcatgaattaatgcagatttagtagaatcagacgttttgtctttacgattaatagcagttctataataatttattcttttacgtaaatttttagtttttccaatataaacaagctcatcatttatagcaatagcataaattacgttatacttatttggaatagatagttgttttatacttccgttgtcgtctaattctaactcagtatatttaataaatgaatattctgttgcaatttctttcataataaaatgggccttgcggcccactccttaaaagtattttttaaaactcatcataactttatcatcaacatcattatcaatctgtgcaacaagataagatgacagttctacttcttgcggcgcggattgaacattatcagaattaaggtattcacgaatccaaggatatggatgtttaaccggagcatcggtaatcgggcatggaagaccacactgtttcatacgagatacagttaagtaatcaataaagctccacatgctatttgtatttaatccaggaacatcgccatctttaaataaatgaactgcccaatctttttcttggcggttaacttccatgaaaatatcaactgcttcttgttcacactcttgggcgattttaacccattcatcaccatcagtgccaagttgaagttgacgaataatatattgggtgcctttaaggtgaagctgctcatcacgtgcaatgaacttcataatcttggcattaccttccatgatttccatgttcttatggaagttaaaggtacatgcgaaagatacataaaaacgaatagcttccaatgcgttgattacatgcagacaaaggtaaagagaacgcattagttcgtatttgcattcttctacatgcataaggctatttgaatatgcgtccaaatcatattcattctctgaaaaacacctaaaaatttcttttgcgttttcccattcacgagttttctcaataacatcatcataataacgaccaatagattcagcacgtttcatgatagctttatctaatacaatctcatcaaatacctttgacggatcagtataaagatttcgcatgatatgagtatatgaacgactgtgaatagtttcactaaaagtccatgtagcaacccatgtatcaaggcttggatctgaaattaatgacataagtacagcagacggtgcacgaccctgaatgctatccagaagtgattgatacttcagattattagtaaaaatattctgctgatattgaggaagcttattaaactgtgcagcatccatcattaagtttacttcttcaggacgccagaaaaatgacaactgcttttcggttaaatcttcaaaaactttatgacgttgaatatcataacgcgcaataccaagacctgaaccaaaaaacataggttcttttaaaacatcaactggatttgtattaaaaactgtgctcataaattttccgcttagttaatagttggtgactcgtccgtgagtcaaattatatcataatttacaggatgaacaatcttcagcttttggagtttctatttcataatcatcagtaccagaaccgtcacgggtattatgataatagaaattttttccgccaaaataccaaaaatacaaaaggtcatcaatcattattgacattggaacctttccttttggaaaaatctgtgggtcataatatgtattcgctgaagctgattgacaaacccatttcagcataatagctacctgcgtaagataaggtttattacctttcttagctaatttccatgtataatcataaaggtctatgttatgctcaatattgggcacgacttgattaaaggagccctcttttgattctttaacagagactggtccacgtggaggctcgataccgtttgtactgttagaaacttgggaagatgactcacatggcataagtgctgataatgtgctattacggatgccaaagagcttaaggtcttcccgcagcgacgaccagtcacaaacgtattttggagctgcgatttggtcaatctttttattgtaccagtcgataggtaattcgcctcgagaccaacgagtgtctgaataatattcacaaggtcctttttctttggcgagtttaatggatgctttaatgagtccatactgtaatctctcaaatagttcatgtgttaaatcgttagcatcttcataagaagcaaagttacttgccaaccaagctgcatagttagtaacacctacaccgaggttacgacgctttttagctttttctgcttcaggaactggatatccttggtaatccaaaagattatcaagagcacgaacctggacttctgccaattcattaattttatcttggtcttgccagtcaaaattatccagtacgaatgcagagagagtacacaatccaatttcagcatcaggactattcacatcatttgttggaatagcaatttcacagcacaagttactctgacgaataggtgccttttcacgaataaacggagtatagttattcgtattatcaatgaactgtacataaatccttgctgttcctgagcgttcagtcatgagcaattcaaatagttcacgagctttaatacgctttttacgaatattagggtctttttctgcggcttcatacaattcacggaaacggtcttggtctttaaaataagaataataaagctctccgcccatttcatggggactgaacaaagtaatgtaatcgttctttccaaaacgttccatcatcaaatcattcagttgaacaccataatccatatgacgaatgcggttttcttctacgcctttgttatttttcaaaacaagaagattttcaacttccaaatgccaaataggataataagcagtagcagcgccgccacgaattccaccctgtgagcatgatttaacagcagtctgaaaatgtttccaaaaaggaataacaccagtatggcgtacttcacccatgccaatcttagaaccttcagcacgaatcataccaacgttaataccaattccagcgcgcttagagatatattcaacaatcgaagcggaagccttattgatagacttcaatgaatctcctgcctcaataacaacgcatgaactgaactgtcgagtcggagtacggcaaccagccataataggagttggcagtgaaatctgtcgagtagatactgcttcataaaaacgaataacatgttttaatctatcaacaggttcatcttgatgcaatgccattccaatagtcataaatgcaaactgtggagtttcataaatttgaccagtggttttatctttaactagatatttttcttttaattgcatcgccccggaataagtaaattccatatcccgttcgtgcttaatttttgattctaaaaatgtaatttcttctgctgaatattttgacaataattcggggtcatatttaccttcatttacacagtaagaaatatggtcaataaatgaacgtggttcatattgcccgtaaacatgcttacgaagagcaaacattaaacagcgtgcagctacgtattgataatcaggctcttcaactgaaatagaattcgcagcagccttaatgacaatagtctgaatgtcatcagtggtcattccatcacggagatatgatttaatattttcatataattcataaggatctacagatgttccttcagctgcccaagataaaactttaataattttttgtggatcaaagctctgagaaacaccactacttttgataacattaattaattgcataagtcctcaacttgaaaatcgtctttaaacaatcggttaactatatgagctattatatcaccatgacacggctttggtttacatgtgcatcctagcctcattccacgtaaaggctctaaatgtgctttagttatttctccggatttaattcgacgtataaaatcttttttgaataattcaatggcagcctcccggctgccagcatctttaccgacgtaatttccccaaaatgtaccacggtgaatattaacatcaaagtcggatttatatttattcactacctggcatagacggcccgcgcggtgataattcgtcatattgtttttccgttaaaacagtaatatcatagtaacaatctgaagaagttttaactgtagaaattttattatcaaaatactcacgagtcattttatgagtataatattttttgccataaatgataataggctgatttggtcctggaacttctaactcgcttggattaggaagtgtaaaaagaacgacaccagaagtatctttaaatcgtaaaatcatatatcctcgcaattaaattaaaattataccgccatttttcctttcaagacaccgtgggactgataatctttgagaacgaaatctttaggcctgagtttaagaatatattccaattgttctttagtagaaagataacggaatttataaggcaatccgcctattaccagttcacaaagctctttaggttcacgacgtaaaatttctttacattgttctacgtgattcatatagatatgagtattaccgccagaaaatatcaaatctccaggaataagattacacatcttagctacaatatgaactaacgcagcatatgatgcaatattaaatggaagaccaagaaaaacatctactgatcgttgataccactgcaaatccaaatagccattacgtacattaaactgatagaacatatgacaaggcggtaatgccatatatttaagttcagctggattccacgcagaaacaatttgtcgcctatcattcggcagttttttaatacgatcaataacttctacaatttggtctacaccgccaaaatcacgccactgttttccataaattggaccaagttcaccgctatggtatcctaaatcttttgcttgattttcgtaattttcatcccagactgttttgccttgaattaatgaatcatgctgaattaatcgtaaatcattgacatttgtgcttcctgataaaaaccaaagtagctcagcaatgcaagctttccaagcgagcttcttagttgttaccgcaggaaaacctttagttaaatcccagcgtaatttagtaccgaacaaagcaattgttcctgtgcctgttcggtcatcggtttcatagccattttcaaaaatgtctttaattaaatcttggtattgtttcatttagtaccttatataaattataatacattttatgaagctaaataatcaatacggtttagcatcaaattttctctcaatttcaggtgtgaaatataattctttaccgcgtttggaaaagcgaccaataatatgataattattctcatcaaacgtgatattaccaatatccatagctttcaaccaaatatcgatatttctatccagctttatgtcaaaattccaatacggagaactattaccgaaaatactgcaagcggattcagtgaaacaactgctataaatcttgtctttaggaactactaattgatagacacctttaataaactgaggaccctgccactttggctgtttcgtgtctttttctaatagaatagggtaataattaaaattcatatttccgccacgcgttatttcatttatatactgattccgtaagggttgttacttcatctattttataccaatgcgtttcaaccatttcacgcttgcttatatcatcaagaaaacttgcgtctaattgaaccgttgaattaacacgatgccttttaacaatgcgggaaacaactacttcatccgcataaggtaacgcagcatataacagagcaggcccgccaattacacttactttggaattctgatcaagcatagtctcgaatggtgcattaggacttgaaacttgaatttcgccgccagaaatgtaagttatatattgctcccaagtaatatagaaatgtgctaaatcgccgtctttagttacaggataatcacgcgcaaggtcacgcactacaatatgactacgaccaggaagtaatgtagataatgactggaacgttttagcacccataatcataattgtaccttcggtacgagctttaaaattctggaggtcctttttaactcgtccccatggtaaaccatcacctaaaccaaatgctaattcgtcaaagccttcaactgttttagttggagaataagcgaataccaatttaatcattacgcaaatcctctttcgataaaccattcagtggctttattagcatcaaagaataattcttcatacgtcttttctttgttttcaaaaactgtcacacaaacacgttgacattctccacagtattcttctgacatacttaaagcgtcagaaaacatttctttaaattcatttaaatcaggattatgcaatgcgttaaaaattgcataatcgaattcatcattcataaattcaaatacaaaaatcatattacctcccactgaaaggggccagaagcaaatccgctatctttaatcattttaactaaagttaccattcctctgttaactgcttgtgagatttcatcaaaaacttcatcactatcaccataaagatcgctaaaaagttctaacacgttcttctgaacttttaatttacagccaacaaattcgcctacagtaaattcgtttccgccaactccagcgtaaaacgtaattacaccagttaatggtctttcactagaacataggtcgtgtgataaattaatataagccgtcccgggtgcagttttaagttggcaacgaatacttactcgagcaattccagctacacgaatgtcagacatattattttcctcaaatagactttttcacaattttccaatcagctttaaactgctcgacgtcagaatggtaaatccaaaatcctgcgctttctccatcctcataaagagggcatccatcacattcatcttcccaccccatatcgcgtaaaaggtgttcagctttttcaacaagttcagaatctttaccgatgatattaaaataccatttacctctaacttctgaatctttgatactctgacgttgtaatctcattttattctccttagcaagctttaatcaaaagatataaacagaccaacataactgctgccataatataaggtgcgaacattttcttttctccattagttttgatagggtaatagtatcacactactaccctgatgtaaactactttttgaaagtttttcgcaaaagttcaatgatttcatctacattattttcgtcaacaatgcagtgaatttttgttacgccagaaaccttgtctttaacttcatcctcttcagaagtaggttctttatattcgcggaaacaatgaaattcgtcttcacaaacgttaaagtaaaaatgctttccatttgcgcattcaatgtgttttattactctaaatccatcaacaaagaaagcttctttaacttcaaaccatccaccattttcttgaataattttaactattgatgaattagaacgtgggcgataattaataaatgtatcaataagtcttggaacaagctcatactttttgccaatatacattacgttttcctcattttaacggggcttgtaatagccccttgataattattgttcaatcaatcccatgtaaaattctgcgtcttcagaatccataccatcacaatattcattagccataaagcgggtgaggtcttcaagaggaccttcaatgacaatagaaaaattgcaataattgggatcatcgtgaatacttgtgatactaagttcaggataacgattacgaataatttcttcaatatattcaaaatcaacgatgtcaatatcaactttagccatattgttttcctctttaatcgtcagcagtattgctgatagttgtatagtaccatggaaggacaaggatgtaaacagttttgtgaaaaaatttttaaaataaaaaggggacctctagggtccccaattaattagtaatataatctattaaaggtcattcaaaaggtcatccaggtccgtgtcatcagcactagatgaactgccagagcttgagctcataaaatcatcttcagtttttgtattgaagtcatcaacattgaatgcatccaaatcatcagcaactttatcagctttcttagcagcagttgcagcggcaccgcccatcacagcagttcccataacttgaccgaatttagtattcagttcttcaaatgatttgaatttatctttagaagtcatttcagaaaggtcaaccatttgttcgaacagttctttctggaaagattcatcatcaatgtttggaatcgcagattgattcaggaatttagattcgtcgtagttactaaaaccagaaacttgtttaactttcagtacaaagttagcaccttcccacggacaagttacatcaacaggagtttcacccatttcaacatcaactgcaatcattgcattgattttatcccagattttcttaccgaaacggtatttaaatactttaccttcattttctggagcagctgggtcttttactacaagaatgttagcccagtaagaagttttacgtttaacaagaccgtactctttattgtcagtgttgtacaaatcatttttactgatatactgacatactgggcaagaatcgtaatcaccgtgggtagatgaacagttttcaatataccatttaccatttttcttgaaaccgtgatttacaagaattgcgaatggtgcttgttcatcatttttagacggaagaaaacgaattactgcttgaccgttacccgcattatcgagtttcagtttccactcgcctttatcttcagaagaaaaaccacctttgtttccagccagtttagccatttgtgcagcgagttcagcagtagatttacgtttaaacatttttatttcctttttaatttaattaacagttggtgctatgacgatgtatgacctcatagctggtcagtgagataattataatctatttataataagcaattaatacttgcaagatttcacagtttcaataaaaacacttttagctttctgtgaatcaatatttaaaatttttctataagcctttaactttatagaataattattccagactaaattatcagtctgttcatcatgtttatcaattatatttaaaaacgaatcaagcaagataaacgtttcaaacgaaattatattcgattgaagtagtttaaaaatataacttgattgaacttttggattatactcaaaaatttctttaaaagcagaaacttcaacttttttactaaaataataaatgttgcgaatatcttcttcaaacttaaatttaatttgctttaagcgtcctatatattcacgataaaacacaagtgcatcagcgtcagagatgtcaccaatccaagcatcttggttagcaaccaaattacttataaaaattaaagcaagttcctttaatttatatttttctgataacttctggaaaaaatacttatcccttcgcttttgataagcggcatcagacacccgcatgcaccaattatacttaattacatcatactttccattcatatgttgttttatcattaagtataatttataaactgatttaccatcaatatatctttcaccaccagcaggcatgcggagtttaatcatagtagaaaatctaatgtattagttttttcacaacgaacaacagaaggacgtaaaagattttcgtcaatagcttctgactggattttttcaattatccccgaaggaataaatttagcaaattgagtttcaggaatagagttttcttccaagaatgctgtcgtagcttcaagataactcattccaaactcttctaccattttttcaataataaatccattttcttggcggtcaagaagctttgcaatttcatccttttctttcttaattgaaagttctttttctgaaagaccggtctcatcgaccggacgaatatcatttagagaaaactgtgtcataaagttcaactacctcttcagtttcagcttcaaacacatcacggttatctttatgatacaaagctaacagacgattaaacatcttgccatcaacaccaagttcatctttggcacgaattcgaatatctttaatcaattcattataaccagaaattttcagtttatgatcagatgcttctttaataaatttagccaagtcttcgccatggatagcttcatcaaattcaaccatttcttttttagccattattcacctcaaaattcattaatgctattagttaatttagaaagacccgcttttacaaaatatgaataaattttgccgcgcggtggtaatttatatgaattatagtaattcacaatgtttgaagcaatattatcaggaatataatcaaaatcaattagaactaaattttctttataacgattatattcagattctgtgagaagcaccttagcttgctcacggtcattagcaatagcttcaacaacagaggttttcattgaaggagttcgttcaccttcaactctggtaaaccaaaagtcagatcgtactttaactgaagcaacgttatcctttttgtcgcccttaaggattttagtcatacagtcaatttcagcagaaccgcttttaattttaacccatttcttatgcatcggcgaccattgcttaacatttggatatttgtgaagctgagtaaagtcaccatcagatgaaatgattaaaatcttgtgtccttctaaagagaactttttaacaagaatagcgatatgatcatctgcttcatacttatcaatatccataacgatgtatggcatataagctttcaattcatctataactttatggctggattcaaaataaccttcccagtcccaagtagattcttctcgtgcttttccgcggtttttcttataataataagcgaaatcacggcgccagtatccagatttcgcgttatcaatacacagcacaattttagtgtatccaagagtttttgcttttttgacattaaacttaattgagttcaatatcaaatgacgaaccattgataaattaattttttctttatctggaaagtttaccaaagcagttgaaagcgcaatttgactaaagtcaataaagcaaattccttctttgtaatcttcatccagcatcatttctaaatccatatgaacctcgttcaattagtgagatttctattatataccatccaaatcttaaagtaaacaagtataaatacttattattgaaaacacaataggagcccgggagaatggccgagattaaaagaaagttcagagcagaagatggtctggacgcaggtggtgataaaataatcaacgtagctttagctgatcgtgccgtaggaactgacggtgtaaacgttgattacttaattcaagaaaacacagttcaacaatatgatccaattcgtggatatttaaaagattttgtaatcatttatgataaccgcttttgggctgctataaatgatattccaaaaccagcaggagcttttaatagcgtacgatggagagcgttacgcactgatgcaaactggacaactgtttcgtcaggaccttatcaattaaaatcaggcgaatcgatttcagttaacaccgcagcgggtaatgacattacatttactttgccatcttctccaattgatggtgatactatcgttctccaagatattggaggaaaacctggagttaaccaggttttaattacagctccggtacaaagcattgtaaactttagaggtcaacaagtacgctcagtactaatgactcatccaaaatcacagatagttttaatttttagtaatcgtctgtggcaaatgtatgttgccgattatagtagagaagctgtcgttgtaacaccagcaagtctctatcaggcgcaatctaatgattttatcgtacgtagatttacttctgctgcaccaattaatgttaaacttccaagatttgctaatcatggcgatattattaatttcgttaatttagataaactgaatccactttatcatacaattgttacgacatatgatgaaacaacgtcagtgcaagaagttggaactcattccattgaaggccgtacatcgattgacggtttcttgatgtttgatgataatgagaaattgtggagattgtttgacggggatagtaaagcacgtttacgtatcatatcgactaattcaaacattcgtccaaatgaagaagtcatggtatttggtgcgaataacggaacaactcagacaattgaacttcagcttccgactgatatttctgttggtgatactgttaaaatttccatgaattacatgagaaaaggacaaacagttaaaatcaaagctgccggtgaagataaaattgcttcttcagttcaattgctgcaattcccaaaacgctcagaatatccgcctgaagctgagtgggttacagttcaagaattagtttttaacggtgaaactaattatgttccagttttacaacttgcttatatagaagattctgatggaaaatactgggttgtgcaacaaaatgttccaaccgtagaaagagtagactctttaaatgattctactagagcaagattaggcgtaatagctttagctacacaagctcaagctaatgtcgatttagaaaattctccacaaaaagaattagcaattactccagaaacattagctaaccgtactgctactgaaactcgtagaggtatcgcaagaatagcaactactgctcaagtgaatcagaacaccacattctcttttgctgatgaccttatcatcactcctaaaaagctgaatgaaagaactgctacagaaactcgcagaggtgttgctgaaattgctacgcagcaggaaactaatacaggtatcgatgatactacaatcatcactcctaaaaagcttcaagctcgtcaaggttccgaatcattgtctggtattgtaacttttgtatctaccacaggagctactccagcttctagtcgtgaattaaatggtacaaatgtttataataaaaacactaataatttagttgtttcacctaaagctttggatcagtataaagctactccaacgcaacaaggcgcagtaattttagcagttgaaagtgaagtaattgctggacaaagccaagaaggatgggcaaatgcggttgtaacgccagaaacgttacataaaaagacatcaactgatgcaagaattggtttaattgaaattgctacacaaagtgaagttaatacaggaactgattatactcgtgcagtcactcctaaaactttaaatgaccgtagagcaactgaaagtttaagtggtatagctgaaattgctacacaggttgaattcgacgcaggcgtcgacgatactcgtatctctacaccattaaaaattaaaaccagatttaatagtactgatcgtacttctgttgttgctctatctggattagttgaatcaggaactctctgggaccattatacccttaatattcttgaagcaaatgagacacagcgtggtacacttcgtgtagctacacaagttgaagctgctgcaggaacattagataatgttttaataactcctaaaaagcttttaggtactaaatctaccgaatcgcaagaaggtgttattaaagttgcaactcagtctgaaactgtggctggaacgtcagcaaatactgctgtatctccaaaaaatttaaaatggattgtgcagagtgaacctacttgggcagctactactgcaataagaggttttgttaaaacttcatctggttcaattacattcgttggtaatgatacggtaggttcaacacagccattagaatcatatgagaaaaatggttatgcagtatcaccatatgaattaaatcgcgtattagcaaattatttgccattaaaagcaaaagccgtagatagtaatttattagatggtctagattcgctccagttcattcgtagggacattgcacaaacagttaatggttcactaaccttaacccaacaaacgaatctgagtgcccctcttgtatcatctagtactgctacattcggtggatcagtttcagcaaatagtacattaactatttctaatactggaacggcaactcgtctgatttttgagaaaggacctcaaattggaacaaacccggctcaaacgatgacagtcagagcgtggggaaatcaatttagcggggaatcagacacaacacgttctaccgtatttgaagttagtgatgaaacgtctagtcatttttattctcagcgtaataaagctggaaatataacatttaatatcaacggtacagtaacaccgataaatgttaatgcttcaggaacattgaatgcaaatggtgtagcaacatttggtaattcagtcactgcaactggtgaaattatttctcgaagcgcaaatgctttccgtgctattaacggaaattatggtttcattgttcgcaatgatggatcagtaacgaattttatgcttactgcatcgggtgatcagactggtggatttaatggattacgtccattgtccattaataatcaatctggccaagtaacgattggtgaaagcttaatcattgcaaaaggtgctactataaattcaggtggtttaactgttaactcgagaattcgttctcagggcactaaaacatctgatttatacacccgcgcgccaacatctgatacagtaggattctggtcaatcgatattaatgattcagccacttataaccagttcccgggttattttaaaatggttgaaaaaactaatgaagtgactggacttccatacttagaacgtggtgaagaagttaaatctcctggtacattgactcagtttggtaacacacttgattcactttaccaagattggattacttatccaacgaccccagaagcacgtaccactcgctggacacgtacatggcagaaaaccaaaaactcttggtcaagttttgttcaggtatttgacggaggtaaccctcctcaaccttcagatataggagcgatcccatctgataatggaataataggtaatcttactattcgcgatttcttgcgaattggtaatgttcgcattattcctgacccagtgaataaaactgttaaatttgagtggattgaataagaggtattatggaaaaatttatggcagagtttggacaaggatatgtccaaacgccatttttatcggaaagcaattcagtaagatataaaataagcatagcgggttcttgcccgctttctactgcgggaccatatgttaaatttcaggataatcccgttggaaatcaaacatttagtgcaggtcttcatttaagagtttttgacccttctacgggagcattagttgatagcaagtcatatgctttttctgcttcaaacaatacaacatctgccgcttttgtcagtttcatgaattctttgtcaaacaatagacttgttgctatattaactagcggaaaggttaattttcctcctgaagtggtatcttggttaaggggagcaggaacttcagtttttccatcagattcagtattgtcaagatttgacgtatcatatgctgctttttacacttcttctaaaagagctatcgcattagagcatgttaaactaagtaatagaaaaagcacagatgactatcaaactatgttagatgttgtatttgatagtttagaagacgtcggagctacaggatttcctaaaagaacatacgaaagcgttgagcaatttatgtctgcggttggtggaactaataatgaaattgcgcgattgccaacttcagctgctataagtaaactttctgactacaatttaattcctggtgatgttctttatcttaaagcacaactatatgctgatgctgatttacttgatcttggaactgcaaatatatctattcgtttttatgatgcatcaaatggatatatttcctcgacccaagctgagtttactgggcaagctgggtcttgggaattaaaagaagactatgtagttgttccagaaaacgccgtaggatttacgatatatgcacaaagaactgctcaagcaggtcaaggcggcatgagaaatttaagtttttctgaagtatcaagaaatggcggcatttcaaaacctgccgaatttggcgtcaacggtattcgcgttaattatgtctgtgaatcggcttcacctccagatataatggtacttcctacacaagcctcttctaaaactggcaaagtgtttggacaggaatttagagaagtttaaactgagggagccttcgggttccctttttctttataaataatattaaaataaaggggcatataatggctgatttaaaagtaggttcaactgtgggtggatctgtcatttggcatcaaggaaattttccattgaattcagccggtgacgatgtactctacaaatcatttaaaatatattcagaatataataaaccgcaggcagctgataatgatttcgtttctaaagctaatggtggtacttacaccggtccaattactattaattacggggtaaatagttatcttcaattaagtaataatgaaacccctatccgaattcgttctggtggcggcactggtaatactcttgtagttggcggctcttccggtggtattagttttagacctgcaggtagtgaaatcactaccggacaaattactattacgccagaaggtttgacaacatttaccagggctgtaacggctccatcggtaactgttacatctactccttccgcagcatctgatgttactcgcaaagattatgttgatggagcaataaatactgttacagcaaatgcaaactctagggtattacgctctggagacactatgacaggaaatttaactgcgccaaaccttttttcacagaatcctgcatctcaaccttcacacgttccacgatttgaccaaatcgtaattaaggattctgttcaagatttcggctattattaagaggacttatggctactttaaaacaaatacaatttaaaagaagcaaaactgcaggtcaacgtcctgctgcttcagtattagccgaaggtgaattggctataaacttaaaagataaaacaattttcacaaaagatgactcaggtagtgttatagaattaggtttaaaatatggaggaactataaatgggtctttagaggttacagaaaatataactggaactttaattggaaattctagcacagctactaaattgcaaacacctaggaaaattaatggtatatcttttgatgggtcaaaggacattaccttaactccatctgacataaatgtcaatagcacaacatttataaaaaataatggcgaattacctactgatgctaatttagatacgtatgggcccattgaagaatatcttggtgtttggtcgaaatctacttcaacaaatgcgcaaccagcaaataaatttccagaagaaaatgctgtaggtgttctagaagtatttgtggccggccaatttgctggcactcagcgttatactgtaagatctggtaacgtctatattcgttccttatctgctaaatggaatggcgtcgatggtccatggggtgtgtggcgtaatgttcaagcgtcaactcgtccactttcacaaacgattgaccttgatagcttgggagaattagaacattgtggcttatggcgaaacagttcaagcgcaatcgcatcatttgatcgccattatccagaagaaggatcagccgcacaaggatttttagaaatatttgaaggtggtttatacacgagaactcagcgttatactacccgcatgggtatggtttata

SEQ ID NO: 2 - DNA, 53143 bp, unidentified
  source 1..53143: mol_type = other DNA; note = Found in a bacteriophage isolated from wastewater
ctcccaccaaataggcgattcagaaatcttcggcatatccaaaccagattccgcatatacgacagcctctgctttgctcagttgtatatcactttcaagtaagtcaatctcgaccacttcaaaatacgtctcatcggtgttcttgttaattgcaatatacacagcttgattcagcttaagcttccgcatgtatacttgcatttgagcatagtgtaccggcttactggctttaacagacttgagcttgattagctctttaaacgacttatcaccatgcgttttgaattcagcaagtgcccatacgcctttgtatttgattacacagtcacaagacccagagaagatgtcattgaaatcgtgtatgcgccactgcttacctgttttaggattgacgtccagcacttcatcacacacggaacgaagccacttcacaattctgctttcttcaaggttaccacgttcaaacagacgaagttgcttcgcggtaaacttctccttgtatgaccagtgcagtacatgccaaagatagcgatagcagttatggcctatctgcgatgctccaagatgcccgcgtcgttcttctctttcgtgggcttctactatcttgacatcaatacgcttctgcaggtcgtcaaacggactgggcattattaaactcctcaatgctgaattcatcgtatacaatattatgcgcccacaaatgagcgacggcatttgccatgctgtccttccatttggattgagaagctgtgtgtgccaatgcaactacacgtaccaggttaaggttggctatcagcatatctgcacaatgttcgcacggcgggtaggttatgtagatggtaaccgggcctaatgaaggagtgtctaactcactccttatattagctaaggtatttatctcgctatgaatagttagagcgttcttaaggctattaggcactattcttatagagtctaactgcgtaggcagaccgttatatccagtggaaataatacgcttgttctggtccacaagaacgctaccgacttgacgtttcgggtccttcgaccagcttgcaacttcacaagctatgcgcataaaccgcctgtcccacttgtccatcttcttcttttgcatggtagtctccgtatacgaaaataggggccgaagcccctattgaatatctactcggcagggattattcttcccaaggagctgctgcaccgtcatcagcaccaggtgccgttgcagtagcactcgccttcgttgaagtacccacacctgcacctactttcttcgtcgtcgatgcagttgcttgagaatgaccgcctactgcagtagttgcttcagttgacgctttgtattcgcgaatatcgttttgtgggtcgtactcaccggtcttgtcgatacgaacaccaactttaccagctacaatacggttttccagtaagtcggtagaagtcagttcaacaatacccagcgcacgacacagcgcagacagtttgcgatgaccgatttcaacagcttgtgcattagggttggagtaggtaatcatgtcaaatacaacacggttagcgaactcaccttcctgcactttaagacgcagggacaggtaagaaccagtgcctgctttagtcggcttcagctcaacctcttcaatcatgaagttgtaccagcctttcgggatcgggtcaaaagactgttgcggttcgacggtagagctgttgaagtttaattcagccattgtttggtatcctgtttaagtttagtttaatttcgtttaacgctttaccggcagcgttcggccgtgatgcttattatacgccactttttatcatggcgtaaacacttttattcgctggtttctttctcagcttgagcggctttcttcgccatccaggcttggtgcttctctttcgattcgtccgaaccgattttagtgagctgcacgttcgggtcgtcgttctgcatctgttctgcagctcgacctgtcaggagcaggtagctgtctgactccggatgatagtaccacagctggtaaggatgatagccttgcagcttgtcataaatccagcccaggtctgcaggttcacgtgcatccagctcacgacctggtgcgttacggcacttagcttcccattggtagtcaggctgggtctggatgtagcgctcgctgttaccgttggcatcaggcgcagtcatacgtaaagcaagtaccgcatccatcaggtacggcaactgcttaggtagctgttggccaggcataagaggtgagtacagcattgcaccagtaacctcgtccttgttcttctcaagcttgcacaagtatgcaacgctgaaaggcaggtcacggaactgacgcatgatgtacatcatcttgtcgttggtgttaccatacgcctgtcgtttgtcattaacctgtgacttctcgtagtccagacaaacttcagccacatctgacagcgaatcgaaaatcagatgctcatacttctgcgcatccttactttcggtaagccatttgtacagcgccagaatgtcgttgaacgtattgattggtgtagagtcgatgtcagcgtctgcaatcgacatcaaaccaccttcagcgttaataaccagaaccttgtcgtgaggcaaggtcttagccaggctggttttaccaacacctgatgcgccgtaaatagcgaccttaggtcgcttattttctacggcttgtttagtagatacaatctgaaccattaatgatagtcctcgtaaagtgattcttcatcgcagtacatacgataaagagcttcttcggcttcttccagggtgtcaaactcctcgccacagacggagtattttgtgggttcatcgaatgactcgacgatatgccagtcatgatgaataccgtatgtccacaagtcgcagtcatcttttgcaacgagcttacgtgtggaacgaaattgtgctagagtattgatgctcatattctctctcctcatgtgtatagaggtattatacaccacttacatggggtaagtacactactattttacactaacagcttgacacgatagccgtgacaaaccgaggttggctataacgccatctagcaatactcctgcatgttcttcattgtatgcttctacccacaaagggatggtgacgcccttcagatggtcgctgtacacgttgaacctatatacctgtttgtgtgctttgtcaacacgtacaacagtaaggttgccatcctcgtaaggaggaagctcaacgcctttcttactccagaagttacggaactcagcactattaacaatgccatgtacaacacgttctgtaagctctgttttgaggtcagcacgtgcctttgtactgataaagaaacgacaagagaagaaagcattgacgtttaacacatcaaccgcgtacacaacgttatgctcttcagcagttggtgctttataaacaatatatttagttttgaacaggtccatagtactctccagggaggaagactggcgggcttgcacccgcctaagttattacagcagttctgctttcagcgcagcgataccatccagcaatgctttgatgtccgggttagatgccgctaggtcagcaacaactgactgacgacgacgttccagttctttctcaacttccagatcgaggcgtgctgacgcttcacgcagtaagtcttcaacctgctgacgacgctgatacttgttaaagtcaggtacatcaaccagccatttgagagttgcagtgttgtagccagaagtattggctgcacttacagacacaacatcaacaagcttggtaccgttcagctccggatagttaacattgcgaacatcaacaaccgctttgtcacctacacttactttgccgatgtacttgtaagtgtacacacgaccattcggttcaaacttaacaccaacaaacttcagtttgtcgtctgcaataacctcttcctcaactttgaagttgattgcagtattcttgacaggtgcagccgctttgagcttagcaaccatgtactgttctgaatgagacggacggcacagacggaagacgtcttcattgtacgtcagccagttaccagtctcatccacgcatgcaatctgattagtaccatccagtgaacgaacaccagggcgattcttctcaacacgatacagcttaccttctttcaggttagcgtaagaacggcgggcgataccccagttgtgtttttcagattcatacttagcgaaacggtcaacactgaagttctgcttcagaccacggtcgtcgattacccataagttatcgtaagccccgccgaaagaacccaggttggcatacactttgccctgcgtcaatagggaagtgtttccctcgtcaacacagataacaaaacccagagcttcgtgtgctttaccgctgcggtcaaatactgtagtcatttcttgtttccttgtataccagtttaattgtatgccagagttattccctgcgcatgtgctttattgcttaaccgttaaagacattatatcattagtgagtggtgacgtacacatttattttaaggcagaagtgcaaatagcatcacacaaacaataatgagcacggtcgtagtcttcaaacaagaacacttcgccattggcgacaacttcattactgttgacctgcaggctaatacctgaatgcagaagcacatccatggcctggtccttgttcttgtacgggtcccaaataagctggaagcctgacccacaaaggagacatcccttgagctccggaagagttgactccttcacagtcacattacaaatcttagccagtttagcacgagaatcgagagtactcatttacgtttacctttacgtttgtgtagcggagtatatgttttctttggtacgccaaacatggccgcatatgtaccgacttctttctttgttggcttatccacaatctcgtcaatcacgattaagtcatggttgatattgcgaaagacttcagccgctcttttctcagcaggagtaaagtcaataaccagctctttgcctatcaggctttctttgaacttgtcaaatagccatttgtcacgcggaccaggattgcccataaacataacacgcatctgcttattgtccatggatgatataccccgttatctgtgttgccagatacaaaccgtataccacacacccaactagtatggcatcaagaatcagatgagctatcttcacgtttgacctccggaaggaatgagttatcaaccttaatcagtacgttacggctgttaaccacttccaggctggtgacatcatttttgtgggttacacgaataaatgcaacaccctcagcctgtgcctgctcaatagctttattcagcacaacattatcctgtaccatatgacgtacgcgaggaaggatattgcaaagaggttccatctcatccattcctgcagtacgcataattgacttgagaatgccgaggtggtgacggtaacggtcttcaacattatacttcttgccgttatgttttagttctgatgccatgtaagtctccaaaagttaaggggcttgtgctaagccccgtttaattactcggcttcttccgtagccgccggggtgaatattacagtcggaataccaggtgaagtcttaacaacagggtcgacgatagccagttgttctggtgtcaggttacggtatgcagtaactgacatttcatatttggttttaaacagcttggcaacaacagtcttcggtaacttcttcattacgtcaggcacaagcttctggtcaagtgagcggttaaccttctgctcaaccttgagcttgccaggtacgccatgcatgctgaactcaaccgtttgtgtaccttctttaccgcggttgataatcatgtcgcgttcaagacgagccttaatggtccggcgcaatgtctcctggtcagctttcgcttgtgccatccagcggttcagattcgccagcttgtcgtacagctgttccgtgtccatcgattccagttcttgtggggtcagtgccatcagttgtttcctcaggttgcatgtgcatagttgcaccgatcagtaagcaatagttattgaacattgtacgtagcgcttggcccgcagcaatatccgttacgtctattataccacttttagtggtgacgcgtaaagctttttctttctttgttttttccacgaatgcaatgctgatgatttcttccgcatgaattacgtggatggtacctgcaaactcaccagtcttagctggtgcctggtacactaacgacatagacggttggttactcacttaattgctcctatttatataagtccatccagttacgatactcgtcataaaaccggtcaaactcgtttttggtgagtgcaatagcaacaccatttaccagatgcatggttcgtgttttgatgttgacatacatgacattgctgtacgggaataagctaccgtcattgtcagtgaaataagtaggcgtaatatgaagcgcatcacgcaatgcaaccagtgattcaacagcttcagcgtgccattcacgtctgaaggtcatgcaaggcggtgcgccgtcttcgtcctgggtaccacgcaaagtaaggtatacaatttcggcagtatcattgtgcacaattacgctaatgtcgacgatgtcgctggtacggaaggtaacaaagtgctcttcaattacttgttcgtcggtattagggctgacgccctgaaaggtcttgagtgtgtgaaacattggttgtatctccttagcagaatgtacgtctattatgtatataaaggaggggaaagtaaatagatataaatgtataaaatacataaaagtctatttactctggtttaataacgtgtatataatgagagccccacaaacaagaggagagactcaatgataaagccaaaactgttgcggcatattcgcaacggtattaagctactcgctgaaggcaatgagtatgcctgcaagcaacgcggtattacaaaagtcggcctgttcaataaagagttaccaactcgctactttaccaaatcaccactaacactcgtacctgcagcggagtattataaagaccccgaagcagcccgggctaaaatcaaggaaggtcttgaccgacttgtagaggaaggctatttgacagtacgtcaacacactgaatcatcttattactacaagccaacttctaaggtaaccagcaatgacaatgacgagtcagccgagtgatattctcggtctgaaatactttaagccagaagggattccccaagtcttcaaagatatgaagcgctgggctatatttgagctgacgtacgaagacgagactctcgaagttcaatccaaacctaagaaacctgcaagagcgccatcaggccgttccttcagcacaacagtgcctgaagagtggatgactttcgacgacgccctgtcacgttgtattcgcaatcgtgaaatgaagattaaagctgtgcaggggaatatcacctttgtaccggctttggttgttcctcgccagtggtactttgttgacctggacaaccatgaagataacccagacattgaagctacccacaaagcgataattgaagggactcgtggcgcttatgccgagacgtcaatctctggcaaaggtcaacacatcgcaatccctttaccctggactgcagcaacctctaaagagaaagacgaccagctggacatcaaaatccagaaggctgagatgttcctggtaatgacgggtaacgtgttgagtgagttcaatgctaatcctgtttcagcccgtgaatggcatgcagcaattgagaagttctttcttgaatcaagtgcacctgacattgatgttgagtttgagcaagacgaagaccgtggcgaagagtatgacaaagagctgtacgaacagttagccgacaatactcgctgggcgcttgaacattatctgaatgagcatgcgccagacggtgttggtgtgagtaatgacggttccgaacgtttaagccgcatactcaaagacttgcttcgtgtaacccgtaactatgaagttacacaacgcatcttcatggccagcaaagctgcagcatatgaaggccgcagaccaagccgacataacctgtctgttgacaagtaccatcagtggttcagtcgtgtaggtaagactgtgctgaaagaaatgcaacgtgacggcttattcgttaagaccaagtttgctcttgacatcaacaaagagttagccaagaattcaggtgtctccctggctgagaacgttgagttcaaggtcaacgacgatattctgccttctgatgtattcgtcagaacggcaccgtccgggtttaaacggcttattgctgagatacaggataacatatctcctgctaacagggttaacgactatgccatcggcacagctcttaacatcctgagcaactgcgctggtcgcaagtatgtttgcccagtaggcggtcatgctaacttcctggtaaccaacatcattcttgtgggtggttcatcaatcggtaaatccctgtataccgagttgttcccacaaatccaggcaagtgtaccagacacatcacctatcagccttaaccgtatcccaagggaacagacttttgcaaccaggacgtttgctgaactgatgtccaacccgtcgtaccattcagtccagttgttctaccctgaatttggtctggctttaggttcaggcttacgcatgaatcctaacaaccctgacaactttcagaaagctctgatggacgcttcaaccaagcgtaaggttggcggtatactgacaggtatcaaacgtgctaatgctgacaatgatgtcaagacggtaagcgaaccgtgttactctatcctgggtgactccactcaagagcttatacttgacaacacccggaagcaagacttctcaagtggctttttgccccgcttcctgttcatcccgaactatgaacgagcggagtttgccaaacctgagaaggtagggcgtcgccagcagattcgccgtactcaattctccaaagaactgattgagaagctggaagcaatcgcttatgtgaatgctataccgcctaacggtaaactaaggcacgacccgattcctatttacgatgagtcggacgatgatgacttcctgtacgagtaccagtgcaatattaatgacatgcgccagtattacagggacaacgaagtagcatctgcctttgtgggccgaatgggtgagtatgtattcaacatagcagcactgattgggttactcgacaactgggatgctcctgtaatgaccagggacaacattgaatgggcttacaaatacgttcttcgttgtataaccgcctgggtcaataacacaagcagaatagtcgcacctccgactaccaacgctgaagtggttgacggcttcctcaaagtctacagggacattttggccctttacaccaaaagaggatggtctggcatagtcaagcattatcctgaaggtgttgtaagaagcttacgggaagaccatctgaaaatgaacgggcttagcatatatgctatccggcaatcattaagttggttcaagtccaattatggctttaacataaccgctaataacaaggttattgacggtatgttgcaggatatgattgaccaggactatttagcagtccaaatatacaaacccacaagagggaaatcggcaaatatctactgtttaaccgaacggggatacgacgaagccaagaaacttaagtaaaatcaagggcttatgtagtaaaatacgtaagcccttattttatatactctttttgctccggtagactagttatggaataaataaaccgtgtttttcgaattaagtgcacttaagttactgttttatatactcttttctttttacatgaattagtaaatatatggagccctttataaagaaaaaggggggtaataaggggatccaagtaccggataaaagggggtatatatttatttattattattattattattatatattattaattatattagaagtaataaaaacagctacttagaggcgtctatatgtatgatccggtttatctctttattaatatcagaaccggatgaaaaaaatttacgctggcgaaaaataataaaaaaccggactgataaataattcgtaggcatgtctaaagccaggcgtggcaagcttcggtgatatttactatgttattgtatgttagtgtgcgttataatatatttattattcaacagatgagttgtacaactatggatccaattgtaaaagtatttgatggtaaaaatatcacattttcatcaattaatagaggaaccaaaatggttcccctcattgttgttaaaggaagcgatttagctaaagcgctaggctacagtcactcgaaaaaactttataaaaggttagacagcgattataaaattactgacgacaaaggaatggtatgggtaactgaaccaggtatttatcaggctatattcggttcacaacttgaatcagctaaagcatttcagcgctgggcatacgaagaagttttcccaaccattcgtgggaatggttattacgttgcaccagagcttcaaccagcgctggatctactgtctgatgaaatagacttactacgtgcatatgctacagctgactgccacggaagagcaaggcttaagtcaagaattatgacagtatggaaaaaacaagtagaaaatggtaactctttggaccgcgtagtccagattttaaaaggaaacagtgcatggtaaatattcgtgttattggtcagaactttgagagaaagatggctaaaaaatttaacgaatcttttggacttgactgccagcgtaacctacagcaatcaataaatggcggggatgacttgcttggtataccgtttttcagcgttgaactgaagaagcacaagaccaagtctatcggaacatggtggagacagtgtgcggcatcagcaaaggctcagaacaagatgccggtactgatatacgaactaccaagaaaacagcctaccgtggtgatgaataaggctgatgtgattgactgttttccaagtggcacgacttttaacgaggcatcgaaccgcctctttgtgggtctagtagaattaacatgggaacaattttgccgggtctacaactattacgttgcgcccggcactcaatatcacgtcaattaatcttgtttcaactcgtcgcaaatgacacgctgatttttggcagggataataccaagatttagcagggtgtatggactatcggcgacacattgctcaacggtagtccattcaggtttggattcaacaatttcgtaactacagtcatgagtagccacacatgttgccaggattaagccaatcacaagtaatctccatcaaccagaaactcaaacaattggttgtagacgttgcaacctttagcgaaagagctttcagcaggtttaccatcgcggacgatcatcatatactcaccgccatgaatatccacccagtattgcatgccacctttgaccgggttacgttgtaagaatttaaacattatttgctccttattccaagtttattcaataaccaaattgtcatgtcaacccaggttaacggtacagttttcgggggttgataattccagcagcttgcagttctttgtatttctgcttggcgccgctccgcttcgcgtaataccgcatcgtcagaagtgccggcagaaaaaagatcggtaacaccagataaatcgcgttgattaacacgtcgagcaatgtcatataaatcatccttagaaaacataagccaataccataagaattatcagaaagatcccaaccagcttcctcatagcccgaccttcagcatatgcaggattcacaacagaatactcaacaacatgtttacatcggaccataaggcctccgcttgtgggttaattcaatcatgaggacttttggcaaatcctcattgttgaatcactctatcattacctgaactactattatacactctttattgaagcgagtaaacacttttccaccattagtgcgtttagccccagattttagagctgactggcaccagatatgccactcctcaactgtcaagaatttttgctcagctttgggtggcaatccatgggcaaggtctaccgtagtaaatttgactagtggcattacttgacctcaaattttgactcgtcgtattccggatcagtcacgtcccgggtcgcacaatttttgattgcctcccagtaacgttgggcgtcatcaccatcgacgtaaaccgtccagtggccgtaaccaccttcaaatctgtcccaggcttgttcccagactttaccatcttccagcttgtaccaagttggacgactgtcaaactcgcggattggatggtaccccaacaagggattcatcaggtcaataatgtcttcccgactaatctcctggttctcccacaacaccgtcatgaattgctcaaacttgaaggcgtttggcagaactttgaggacttcaccatcacaatatacggtataggtgccatcttcgcattttgcactgtacatgtttctctctctcttgttgtgaataatttcaatcatgaactatcacaattttggatagttcattgttgaaactatgctaattttgttgcgatctgaattgtcagccggaaatcttccatcaagttatcaaactctttggaaccaccaacagcatcagatatttgatctttcacaatttgggcatttgattccagtaattcaatcaggtgcgccaattcgtcttcagtcaatttcagatctttcataatgcatccacccaagccataacttttgccagtcttacaacgtcttcatggtcccgctcgccatcagaaaattcgctggcgatgatacccataattgacgccagattcatgttgatgatgtaggcgtgttggcgcacttcatcaattcctgaatctatcaccagttccgcaaattcttgtgaaccttcatcccattcagcccaatactgctcagcataaaagtccagttcttttttcatctcaatgtcagtcattttgattactcctcagaacctgaaaatttgtcatcaatggactcaacaatatagtcaagagttgaagtgtgagaactatcagaaaaagtgcccatcttctccagctcaatcatcatatcccgtaaagccattgcctggtctttggtcagtttaattttaagcatgtttctctcctgttgattgtgaataatttcaattgatggcactacttgagtgccatctcaaaaattactcttcagtttcttgggtttcaggttttacttcagtttcaggttttttgccagttactgatttgccctcagtcactttaccagattttacatcattccggtagtatgacatatatgactggataactcttttggctttgatgtcatccgcctccatcccacaggctttcatggcatcaactagtgccaatttggagtcttccttatccatcaggttgtaatctttgaacaccagataacaagtatcttttgttgatggaccagatgaagatttccgggccccgccattggaagatcttgatgccacaactttgacctcttcaacttccagttggttcagttcatcaaacaatgccttcaccagcacttcttttgagtccttgacacttacagtactttcatcattaagggacttaatcatcttaatgatctggttgttggcaaagtactgaagactatccatctgcactacaatagtcccaagactttcagtagtcagaccagattttacagactcaacagaaaaagcggaagtcaggtaaacatagttgatagtagtcattgatgtatcctcattgatagaatttttgataagtgtcaatccttgacaagtaaatccaatcatgaggacttttaccaagtcctcattgttggaaattacttcaacttatccagaattgattggagtaacttgaccctcacttcctgatctttgacatcccttccactctccctgtcatattccaacaggtcactttccataaataaagtggtgtccaattggtcaaccaataattccagttcttcttgggacaattctaaaactttcatcttattactcctgatatttaacaacttgggactggataaaatccacacaatcttccacatccattgactcaaagtctggaactggaccattatttatattgacacaccaaagcccttcattggtatcataccaaagtgtgtagttgtccatcttaatagtcacctcttgtactagtttccagttgtgactactgtttccaatagtcactggttgaaactattactagtgttactatcaacaagaaacatgttaccaaattgttaaagagcaaaaggtaccattgacatctaccagatgtacctgttgactggttaagtactacctacccaaattaaaccataccaataccctccagaccagttgactggtcacacagtcatcacattcaataaatatataatagaccaatcccacttgattgtacaccttatatttgtaagtttatgcaagtttttagaaatgataatcacttgcgattgagagtggttctcatatacaattgatatagtttcacatgtaattactcacttcaaaatggtcggcaggggttataatcacataggggtgccacttaaaggagccggcgaaattatttataaaaatataatttcaatctgaattatagacgctttgtgttataacggccgaagtagttcacacggtaattgtatcaatcgcaatagttaccagagtaatcatttcgattgaaataggtgcggcggggggtaatttcgcaggggtgctacctgccaggagccagcggaattttttattttttctctattttctccttatcaggaccaatcatcatcagattgatacaacaggagctaaccttttgcttatcacaataataagcgaagcccctctaaaatttttttatatttttcaggaattgtgtagacactcactaaaaagtggtgtactttctctcctccacgcgctatcattaatatgaatcatcaaacggcctcacggtctcctacttgtgggtaacattatgaaaattgttcaattagagccatatccgcctcaattagctatcatttgcagcgaaaaagagcacgaagagctccaaaaactgatggatttgcctgattttggcaactggaatgaccgagaaacgcgtactgcatctacctttacattctctcgcgttaactatccgtacctgttaatcgtcgtcgagctgtaccacccggacgacctgaagtacaacaccatttcccacgaaggcattcacgtaatgtcatcgctgatgaactatgtagggcttaaatacgacccagaaaacgatgaatggtacgcatatcagcatgatttcgtcgtaaatgccatttgtaaggcccatgacgagtatatagagcgccaaaaagcgccaaaaactaagccaaaaatagaaactggtaaccatcctgtgatactaccacaagacgtaatgaactcgcttttgactgacactactggggactttttaggtgattaatcttatcttcgcaatgggccaaaatggggaattcgggttgtccccggagtttatgaagcatcaggttgactcgtgcaagactatggaagaggtccgtgcgcttcctaaatcgggtctgccttggaaatgtccgtcagacatgctctttttcaggactatgactaattcaattgcgacagaaccaggctacaatgcatatcagcaactacgtggacagttcccaaatgaccagttgcgaaacatgatagcagatgtaacggtaaaaatggtcgggcatagtgtattgttagccggtcgtaacacgtatatgactatgagtctgcctatgccagcccacagaatactgctgccggtatctcgccagattatggcttcagaaggctacaataacctgggtgagatggcagcagaccttgagtccagaggtactgacgtctggattgtaggcggtgccgagttgatactttcggcccttgaagaacacgcaaaagacttactccgtatcgacaacatgtttatcagtacaatcaagcaatcaggtccaagtgatattttaatggatcgtagcaaattaatgatgtacattgatagcgacttcacttataatgatgaatatgttgataacaaacaagttctgatacaacggtacaggagtttacacaaatgaacatcataatcgagggtcccgataatgctggtaaaagtacatttattgagttccttaaatctcatactggccgcagtgttattcataatactgttgacaaagatcccaaatctgtcatggctaaacagaccaaagaaaacgcgttggaaggcgattgcatttatgaccgtagcgctgttatatctgagtatatctattgcctggttcttcaacgtacgcctgtcatcaatattaatgtatcacatgtagcagatatgtgtgacaacgccatcgttatcttttgtatgccgcctgttgaaaaggtactggcaactacaaaagacgagatgcctggcgttgtggaaaatcttgaggcattatacaaccagtatgacaacctcattgacgagctggttatgatgggcaagcagttcttcatttacgactggactgttgaagaagacggtcctgaagcagttctcgaatacatcaacgaacgtatcaataaggagtggaacaaatgagcccagtatacaatacctcagtcacgctgtcagcaaccgtaggagacgtcaacaagactgttactgtgggttcaactaacccgaacctgtcaggtgacgacctgttgcatctggctaagcgtgcgcttgaagataacgaagtgactggtactgaaggtgtcagcattgagattaacatcgatggttatgaagaaagcatcagcattactacttctgacgatgaaaccagtgaacagctaaagttcaacgacgagctggagtatcgtaccggtgagatgttcagcagtgcgctaaactggtacttgtgcaaggcttcaaactacgctggcgctcctatgtcagaccgtatgttagctgatatgtctgcacgtgaaattgctaaaggctgggcgcatgtacagatgctgcaagagcatatatgcaagctggaaagctgcaataaagacgcgtctgagcttattactgcctataagcgacagattaacgacctgcagcaactgatgggcaaacgcgctgaagaatatgaggctgagattcgcagtcttaacggcacagctgttgctaacaaccgtgctttcagcgaagagcgtaaagcgcttatcgcccagcgtgacgctgaaaaacgtcgtgcagacgacctggcagaccgtcttaactttatccgtaagcacatggatgctatggaagtggtaatctgatggacctgttcgatatggtcgaacatcctgaagtaaacggcttggcggaagctaagccgtttaactgggatgaattcgtagcaggcaaacctgctgtaacccacaacgggcagattgcatattacggaggccatagcgaacatccgatgtgcactcacctgtacaacgctataacaaccataaccgacgaaaacgttattaaatacggaaaagaagtaatgccttttcttgtagatgagcgcggttacttcgaaggtaaatggttcccgtttctggtagaaatggcctaaaaaccggataaatataaaggcgtctaagctagttcttcatctatataagctacttattcgcctttctactgtagactttcttatcacctctctagacactccatttttatattctgtttacttactccgcgtaactcgttataatccccgactatccggattaacgaggacgatacccatggcaaaaccgaaaaaaacccgtgaggcaacagaagagctgttggccacaatgcgacgtatccagctggacccgttggaagttatgcaacgggctatcatacttgctgagcgtgaagacgactacaaagcaatgatggatggtgcactgggcgttatgccgtacatgtatcctaagctgaaagaatccgttgtcaaagcagacatcgaccaaaacctgtccggcaatggcgtcaacctgaacattacaataggcgaccagaaagtggtagatactactggggaagagtaataaatgaatcttgactttcacctgcatgacagacaaggtgccgctctgcggtctcaggcaactgagattctgtacggaggtgccgctggtggtggtaagtctcaccttatgcgtgtaatgtcaattatcatgtgctgcatgatacctgacttgcagatttaccttttccgccgaaactataacgaccttacggctaaccacatggttggtcccacaagttatcctgccttgctggatggtatgtgcaaagctggcaagtgcaagattaactactcgagcaacactatcaaattctggaatggtgcgaacatcaagctctgtcacctccagtatgaaaaagatatttatacctaccagggtgctgagattcacgttctgctgatggatgagcttactcacttcacagaaacgatgtaccgcttcttgcgtaaccgtgtccgactcggtgctctcaaagtccctgagaactttttccggccactgccccttatcttttgtgggtcaaaccccggcggtgttggtcacaactgggttaagcgtactttcgtaactgctgctcctccgatgaaaatcgttaagcaggaaaaacgcgaaggtggtatggcgcgtcagtacataccagctaagatgactgataaccctacgttgatggaaaacgaccctgactacggcgaccgtcttgaaggtcttggtgacccggcacttgttgccgcgatgaaagaaggggactgggatattgttgcaggtggtgcactcgatgatgtgtggtcaaccaagtgcattctgcctcgtatgcgtattccgaaaggctggactatcgaacgttctctcgactggggttctactcacccgttctctgttggtatctgggctattgcaaatggcgcttcgcttacagacgacgaaggcaatgagtactttattccgcgtggttccattatacgtatagctgaatggtatgggtgctctgaaaaagaagctaacaggggtattaaactttctgctgccgaagttgctcaaggcgttatccgcttacaggaaaatctgcaagctggtggctggattcaaagcaacgttaatcctggtccggctgatagtcaaatttatgcgtgcaaggaaaaagacgttgagactatcgcgaagaaaatggaagacgaaggcgtaacctgggtcaaggccgacaagtcacaaggttcgagaataaatggcttagagctattccgtcagcttctgaaaaatgttaagatggacgaaacggaaaagccgggcatttatttcatggaaaactgtccagcagccataaacacgttgccggttctgccgcgtgacaagaacaacacggaagatgtcgacacgaactctgaagaccacgtatacgatgattgtcgttacatggtgttgcgtggcatcaaccgttatactaccaagctcaaaataaatatgggacggtaaaatgtcgataaccccaagcagcacgcctaatgtcggataccagcgtcctgagctgactaagaacgctggtaagtaccgaatgattaaggactgcatcgaggggcaggaagctgttaaagcacgcggtgatttttatctgcctcgtcctgaccctacgaactgcacagaagaaaacctgatgcggtacaattcgtacctgcgtcgcgctgtgttctataacgtactgcagcgaactctttcgggtatgactggcctggtattccagcagcaacctgagatgctgatgcctgatgatatggaagtgctgaaagtaaatatcgacggtgcaggtatcggtgctattcagcaaatgcgtaagtgctttaaatcagtgcttgcgtttggacgagcaggattgctgactgactttccaaaagcacgtatcggtgagtttggtgaatccattggttttacccgtaaagaactaatggatggagaagtgcagccgacagtaacgctgtacatgccatggcagattataaactggcgagaagagtatcgcaacggtaaagtgatgctcactcaagttgtcatttgcgagcaaataccgggggttactgatggctttcagcaagactacacacccgtgtggcgtcacctttacctggatgaagaaggcaattgcaaccagtctttgtgggtcaacaagggcgacaagaatgcacagaacgtctccggtggtgcgttgtatgtcacgcaagagaatgttgtcttacgcgattccaatggtttaccgctgaagtttattccgttccagtttatcggttctgaaacaaacagcgctgagattgaccctccgccgatgtacgacttagctgtgcttaatattgcacactaccgtaactctgctgactacgaagagtcatgcttcgtaacaggtcaacccacagtatgggcgtctggtcttactgaggcatgggttgaagatgttctgaagggtgaactgcgactcggttcgtttggtggtattccgctgccggctaacgccgctgtaggtattatccagaccaaccctaatacccagccgtttgaagcgatgaagcaaaaagaagcacagatgattgcaatcggtgctcgacttattcgtgagaacggtaaggtagaacgacgcgaagttgagattaagaatgaagctgcatctgaggcttcgcttatcgtaactgttgcgcagaacgttgaagctgcttatcggaaagcaatcgaatggtgtggcctgttctacggacaccctaaagaagaaattacgattaacctcagctacaacttcatctatagccagttgacttatcaagaacgtcagcagctggttaacgaatggattgctggtgctatcacgttcagtgagatgcgtagtaatctcaaacaggctggcattgctaaactcactgacgaagaagctaagaagctcattgatgaagagctggctgaacgtgatgcacgtgaggtagcaaaagaagcagaaaagaacgctcaagcagctaagaacagcgatgggcaggaaaataatccagaaaaaactgaataaagctatttactttcggtttacctggctatataatccttcatgtcaaccgcgcaacagccggccacgagagtctgcagggctcagtggatttcggatggctggctgcgcggtttgacccaaacctgttcagagcccacttgagtggattgagcccctctcatataggattgtaaaattatggcacttaaaacagttgtaactgaccttaccgaagttgatgaaggcttccgtggcctgtatatcaaagacgaagcatctggtgcattccgtttggacgttgaaccagacgaaaaaacgctgaaagaattagaagacctgcgcaaagaaaaacagcgtatggaacagcacaccaaaaagcttctcgaagaaaagaaaaaagaagccgaacgtgctcgcctggctgaagaagaacgcgcacgtcgtgagcgtgatgttgaatctcttgagcgctctatcaaagagaaacatcaggctgaactggaacagtatactaatcgtcaggcccagctgcaagctcagctggaagcgcaaatggttgataacctggcgctgaacctggctaaccaactctctgacaccccggcacttattatgccacacatcaaggcccgactgcgcgctcaggaaattgatggtaagtggcgtactactgtcgtggatgttatgggtaacccgactgctacaacgccagatgaactagtggaacatatgcgcgctgataagcagtttgcacctcttgtgcgtggaaccaaggctggcggtggcggtgccaacggcggcggagctaatcctggtgggaacggcggtggcgaacagcacactttcggaggcggggacgaccgcatagcacgtgctcgtgctaaaatccaaaacacacaatggggcaaataatttatgtcactgtatatttttaacgaacaagtacgttctaccgccaccgaactggttgaccaggacgtacagaagtttaacgaagcttctgcaggtacccttattctgggtaaccagtacgtaatcggtgattacgttgagcaggcgatgtggcagctggttgacggtatcgctacccgccgtaatgcttacgctggtaccaacaaagttgatgcgcagactctgggccagattctggaccgttctgttaagatcgacggccgtgttggtcctctgaacattaccggtactatgatgcgtcgcatcggtgcaggtgatactgaaccagcagctgttgttgctgcacaggcttctgctgcgatgttccaggactacctgaacaccactgctgcatgtctggtagctgctatcggcgcaaacgctgatgttgttctggacgtaacttcaggctctggtgctgctgcaaacatcaccatgcagaacctgaacaaagtcaacgcgaagatgggtgaccgttctcagcagattcgtgcgtacatcatgcactctactgcgttccactccctcatcgaccaggctatcaacaacacagaacacctgttccagattggtgacctgaacgtgtacaaagacttcctgggtcgtcgttatgtcgtttccgacatcccggctctggttgatggcgccggtgcttccgctaagtaccgcactctgggtctgaccccgtctgctgcaatcgttcaggtcggcggcctgtacgacatggttacctccgagcaaaccggtggtgaaaacatcctgcgtcagatgcagggtgaatacgacttcaacgtgtcgctgaaaggctacagctgggtcggtcacaaagctggtcagtctccgactgatgaagacctggctgctcaggcgtcctggtctaaagttgcgacttccaacaaagacaccgctggtgttatgttgctggctaagtctgcaatctaacccacaaacgggactaacaaacggcgagctgactagctcgccttttttatttacacgtataaagttctggtatataatcggactaaacttgctggaggctttctatggcatacacacttgttgtggaagacggttcaattgttccgggtgctaactcgtatgttagtgctgcagaagtggatgagtttatcactaacgaaggtattctcattcaaccaggaactgacccgtactaccaggctgccaaagcagctattcgactggataaccaatttaactggttaggtcgtaaggtcagcaaagcgcagaacatggcttggccacgtactggcctcggtgcatgcaatgttgacatcgcggagtctgtaattccgcgagaagttaagctggcacagctttatatgatggccagtgtattgagctatgacggcgaagaaggtgtgcgtagcgaccaggctttgcgccgtaagaaagttggtaacctggagattgaatacttcgactccaaatcaggcgttaccggcgcaactgacctttggacgtcagacgtcaaggccatgctcaagcaccttgtgggtgcatccctgagaacgcggagagtataatgattcgcattcgccttgaacgtcgcgacaaacaaaagttcgagttcacctaccgtgcctttaagtcgtttgaaggtcaaggcgtatcagtaggtgttcatccagagcacaacagacgtataaatcccagggaccgtataacaaacgcagagctagcaatggtgcatgaatacggtctcaacggtctgccagaacgaagctttcttcgtagtgctgttggtggcaggggtaaaggccgacaggcaataaacaaagttttccgcgataatgtacctgctgttcttagaggaagcatgactgcgcatgagcttaatgacaaaataggtcgtatgcttgttgatgctgttcacgacagaatggacagtgacgtgccgcctcctaacaccgagctgacagaagaacgcaaacgcgggccaggtacacttagagaatctatgcagttgtacgattcgatagggtacaaagttggcagaaactggaggctataatgctcaagataacttcgctaatgaaggataagtcctttgtggcattaacagatgttcttctccgaaatgattcgcgcttaccaaacggtgacttcgaagacgaatatacagctgcaaagtatctgtgtaacattcaacctggtgcagctaccaaccagcctaacctgttgactaaagacgatggtgagcatgagttcccacgtattgcgatatactgtggacaagaactgaagctcggagacttcgttatatacgaagaccagccataccgtgtattccgtatcgacccatggagtcgtcatggccactactacgttacagcaattctccataaaggacctcagggagctcgttcagaagcttttaacattacctgacggttcatgtattattggtgaagagtctggtacagttgatggtacaccgtatgtttatctgcgccctggcgacgcatatgacttcggacctcctagaaccagacaaggctctgacggctttgagtacgtcagcaagccaatgatgactgctgtacgcattacagctgtcggtaagaatgctgctgagctaatgcgtaagctacacatagcactgggtagttcaccagctaagcagtttaaccgtttacgacattatgcaataaccaaaatatcgaagattgataatgtcggtggtgctatcggtgcaggctatgctcagaagtcaatgatgactgttgacattagctatgtacataaagttaagattgagcaaccgtacatctacaaggttgacatcacttgtatggatgataacggtaacaaagcgactggtacagtagaggaaccgtaatggtaactggagtagacccggaactgcaagcgcagctggataagctaacaactgctgtccagctcattcatgacttcggtatgtcagacaacccaaacatccctaacccggaaggtggtgtcatacgcacactcgaaggcattaacgctgcaatcaatgaagctataccaaactttgaaaatgctaacgaagctgctatccaggcgcgcgctgctcgtgatgcagctattgcagccaaagaagctgcagaagccgcagctgaacaggctacagtatcttcgacgtcagcaatctatgagtatggcaatgttgcaagtgcagctaccgtaactatacctgctgcatctaaaacaattgtcagtcttactcttaaccagccaaacaccgtaattaatatcggtggtgtgtctgacccgtctactgttgcgcgtcagattactattgctattaagcaaggtactggttctaacaaggtgaccgcttgggatcccagaataaaatgggcaaacaacagaaagcccgttctgtcattccttgtgggttacacagatgttgttacgttgcttacctttgactcaggagcaacttggatgggtttctttaacggtggatggattaaataatgcacacgatgttgcttaaagacggatcagaccatcgagctaatgtcgaaagccttatcgaaggtcaccaccactttcttgagcgcaatactggtagaactgacgacgctacgcgtcagcactatatcttcaacccagaaggagtagtgtcgaacaaccgccattttattgcgcacactatgatggagtaccaacctaacggtgatgctccgtctgaaagtcagtcgctgctgatactcggcgaaattcacgcgtaccttgctactaaggaacagcggtatctggacaaagcaattgagtacttcaatgcttacgtcaaatactattacgagggtgacccaatccctgatactcctcgtcgctggatcgctaactggctttgtaatggcaaagagcctgtgctagccagcttcccgatcaaccctgattcaccaacacagggcggctataaaaatgtgcctgttaaatttgttaacggcaaagcacaaatccctcatggttctcctttctggggcgagtacctggatgttgctacttgggcccacaggggacacatggcttggcctgctattaatggtggtgtccgtgttattaaaaataaagttgactgggacgatatttacaacaattatcgcatcactaccatgccagctgacccgtggaatcagttagcctggattgactggccgaggtatctgggtgaaccaagctacactgtggactggtcagctgctgaacctcctgtacatctcatcgagtatattgttgcatggaccaataacaagattggtgttctgcctggcaaaaacgatgagctatggggaggcgagattcttgagactggactgcctgactctcgtagaggtgagattcaactccgtgaccacactgttaacggtgtgtatctgcttaactatgccgttaagcttcctgttgaacacggtggttatttgcttaagcgaaatgaagtatggcacaacagaccggtaaacgttccattgtacggtgagcttcaacgcggtaatgctgctgatgctgagttgtggttctgtgactgctgctatatgctgtggcgaattactaacgagcaaaagtattacaacgcttggcgagctgtcctgtttacactggaggagtatattgatattgataaacaagaccagttcttcagacaagaccctcacgcgtcgtctccgtttactgatggcatctcttatgattggacttatcctgaactggcacaagctatatattcacgtgatgaaaatggttatatagttctacgtcagaaccaaaaagctcaatcatctctggagcaacaggctgtatggtttaagtgtaagccaacagctaagatacgtaccgaggttggtggtaaagatgacgctggtcagaatataagtgtcaaggtggaaatgtacatgaaccgtgaaaaggttgacgtcgagcaaaacgtctatcgttttgtcacacagctacctgctcttggtgcttctcctgctaactacgacattccgttaagcgattttgtcgcaggtactaagccagacggttctgagtatatcttagctgatattcgttcatccactgattatggtaatgccactattgcagtgtcttatcgtactgacatactcgacaacagacgtggcaacactgttcgtatgactatacctgatagttcgtcaggtgccattataggcttttggttactggaatcttcccaggcacctttaaactcgctgacgtatacttctacaggtccgttgtacatcaaagtaactgacgcgcaaggctggagctgggtacgtgatttacctgccgcatcaggctgggtaactcagcagattcgtacatgggagttcagactggcgtcataccaggaaaacccaggtacaccacctaccagcccacaattcggcgagattaagcagttctcgtttgtactgcctgacggcgttaatacgtcgacaagtattagctggtactgtgtgaatgatgttccgcctcgctataactggccgattggttacactattaagtaccgtcttactttctcggctgataacccgtacacagctaagctaggtgactgtactgtgctggactatgagaacgataaccttgcatatacgcctggtgttattccgttctccaacatttataaccctgattctcagcagtttgacggttggcacggtctaccttaccctgggtatcagtatccgtttgtctttacgcatgacgatactgcagcaggtacaaccagactgaacaacatggttaactttttgtacgattctcagcaatggtactttaagaagtttggtcagctaggtcctggcgcatctgcttttatctggaaccgttgggataactttaaatacggtgtacctgatacgtttaccatgtatcactggggtaatggtagtgcatggtcaggttaccagcctcgtgcttatttctccgcagcacgtggatggtatgagctagtaaaccgtggtaagccagttccgagtaagcttattgcttatgtggataactggtcaaaatggttgcttgacttcatggaaaggtcaggaggtgtgtcgccttctaacttcccgcaagaaggtgttgctctgccagtcccttcagacttcacaggtcacatgtgtggactatggcttgctggtgcagctatgtcagccctttgtgggtcaacagtatcaggacttgataagctgatggatatgcttgtcaatgagctagaagaccactatgacataactggtattccggggcatgtaatggatggtggttggtcgccagcgttacgccttgaaactggtaccggacctgaaagcaacgccatgtactatggtttttactctggcgaaatattacgagggttgggcttatacctgctgtacaaaaacaaaggggctaaagcagatatttatgatttaggcccgtaaccactatttacttaaccgaggcgccagcctataataagctggcgcacccaataagaggattctccagatggcaaatcgtacaacagccaaccgtcctgttaaagacgcagacctgcgtcaagagtcggttactcagttcccgttagccaagccgaccaagcttgatgagaacggaaaattcattccaaccccagttaccggtgtaactgctacccctaaagctaagtcaattgctgttggtgagtttactactctgacagcagcagtagccccggcagacgcagatgacgtcaccgtgttgtgggaaagcgatacgcctgctaatgccactgttgatggttcaggtcgtgttcagggtatcaaagtaggttcagcaactattactgctaaatccaagcttgaccctgccaaaaccgataccgtagcaattacggtaactgctccgcctgtagccgtcactggtgttacgttagcgcctaagtcgcccagtgttgtagtaggctctactgtacagctgactgcaactgtgctgcctgctggcgctactaacaaagctgttacctacgaatcaaacgatcaggctaaagctaccgttagcgcaacgggtctggtgactggtaaagcagctggcgtcgtcaccatcactgtcaaaacagctgatggcagcgtcactgacactgtgtcagtaactgttactgctgagtaaggagctgattgatgtcgcttccacttaatgaggttgtcgacgtccagttcagtaagagcaacgggggtaaaggttttacccccaatgttccgctggaaggtataatgctttccaactacgagtactcaatcgttgcgggtgatgaccctgttcagctagttgtgcgttacattccaaacaacgctactgagcggggtatggcatggaaatctagcgacccggacgttatcactgttgatgagctcggatttgtgaagccactggcggaaggtgttgcatacgtgactggtacgtctgttgacggcggttatactgtacgagcaaagtttaacattgctcgggcacctatccttgttgaatctgttacagtgtctcccacaagtgtgacgcttgaagagggcaagactcaacgtctgacatacacctatttacctactaatgcagataatcctgatttctactggatttcagatgatgagtctgttgctgtcgttagcgacagcgggcttgtcactgccattggagatggtgaaacaactgtaaacgtacagtacggtgttgacagctctatattcgatagctgtacagtaactgttattcctcctgttgtgcacgttacaggagttgagtttcttactcagtcgcctcttaacgttaatatcggaagcacagctgggactagtattcgtatattgccagaagacgccactgacaaaacagtgacgtatgaaagcagtgcgcctgatgtagcaactgtggatactgacggaaatgttactggtgttatagttggtaatgccactgtgactgttaagacgaatgacggtgataagactgacactcttgatattatagtcagagtgcctgctgtaaatgttaccggtgtaagtattgacgaaggcgatacagcttccatggaagttggtgacactcttcagctacatgccactgtgactcctgaaaatgctactgacccatctgttgtatggagtgctcctgtatcagaagttgcgtctgtgactgaagctggtttggtaaccgctaacgctgcaggcttaatcgatgttactgttatcactaatgacgggaactttactgacagaatcgaggttaaagttacagaccccagaatcgcagttacggatgttgcatgggctcctgactctccgactaaagtaagtgccggccatcaggtgcagactaaaattgttataacacctgacaacgcaaccaacaaaaaagttagctacaatagctcaaacccagacgctattactgttgacactaacggagttatatacggtcaatcgcctggaacttcgactattacagttacaacagacgacggtggacttgttgcctcatttgtagcgacttgcacagaggtggctgttattacaccagatggtcttggtggtattccaattggtggtactcagcagttcacttatactgttagtccgtctgacgctgagctgactaatattcgttatgagtctgctgacccagctattgcaactgttgattcgtctggcgttgtaactggtgttgctagcggcggatgtaacatctggatttacgcaactagcaatggtgctgacattagcgcagctacttgggcacaaatttctgagaaggtacaggtctaccctcagtataccgaatggcttgtgggtaacaccaaacagcttgatgttaagatttatccgtctgactctaagagcgttaccgttacttatgaatcgtcagatgacactatcattagtgtagatgcaaatggcttgatgactgctaagtctgaaggttcagcaactattactgctaacgttgtgatgaacggtgttgctgcttctggcacaacatctccttacgtgtctgagctttctgttactactgactcgttgcctgcactcactgttggtaacacgcaacagctggttgtaactgttagacctgaatacgctaagacagacccaggatataacattcagtatacaactacagacgatactgtcgctactgtaagtaataccggtgttattactggcgttggtaacggtggatgtcgtattggtgccacagtaactgtgagaaacgctacagcgtcggacagctcttatcagtccgtcgatgcagcataaaattaattaactttgcactggccatttacttggttaaacttactgggtataatggccggaaagtccacccaagaggtaaacaaaaatgccgttgaatgtaaaccagattgtaaacgttcaactgaacaacactccaactggtatcagcaaaggtgacttcggtaagctggctcttttaactcaggatcctggcactgcttttcctgacagcgacaacggacactatgttgaaatcggcagctactctgaagccgagtcttattggggtactggttcagttgtacttggcgcgctgaagattttctttgcacaatctccgcgtcctcgttcagtagttatcgcctcatggagcaacaccgctactctggatgcggctattaaagcattcaacgatgtgtatcctgactggtatgttctgcgtccgcttccgcctactggcgagctgtctgacgacgacatcagtttgctggcgtcaactgttgctgcttacgacaaaaaacgttgcagctatacgactactaaagcaactcatattgaaaacagcgactccaacccgattaaagttctggctggtaaaggctacaacaatatgtggcttcagtacgataagaacaaccaacactatgcagacatttctgctatggcgcgtgctctgtctgttaacttctctggtaaccgcactacgattaccatgaagttcaaacaagagcctggtattacaccgaacaacactttaacgctcactgaagctaacaagtgtaaagcgctgggtattaactggtacacctactacagcacctttgctatgcttgcagaaggtactgtcctcggtacgtccaagccgccacgcttctgggatgaagtacatggtctcgactggttctgtaatgctgtccaggcttacgtcttcaactcaatcgctacgtcacccacgaaggtgccgcagacgaacaaaggtcacgagcgccttaccggtgctgcagctgttgcttgtcagcaggctgtcgacaacggcttggttgcgcctggtatctggtacggtgatgagtttggtacactgtcttatggtgaccgactcgaaacaggtttctacatctacatccctgacgtagatgaccagcctctggatgagcgtgaagctcgtcaggccgttgtaatgcaaatcgcgattaagctggctggtgcaatccactccagcgacatcctgattaacttcactcgctaaggagcagatcaatgatcatcgattcttctgaatgcgtgttgagcctgaatggtgttcagctgtccgactgggcagacggtgccgatgtcattgacgtgcaatgggtggacccggcttccacctatcttgcaggtgcagatggcaatggcattcagattatgaacccgtccaaagccattaagctaactatcaaggttaagcaaaatggtccggatgccaaatggcttaacgaccagtacaacctgcagcgtaacaacattcgtggatttgtcccgtttgtgctgcaagccaaagacctgttaaaccaggatttggcatggggtaaaaaaggttactttaccgatggttccccgtggactcgcggtaacggccataacccgactaccttcgctattgtgttccaccaaggtggtatgcagttgactgaaggctttgaccagtaacaatagaggaaagcacaaatgactgagcccaaatcatttgacatcgacgacgtaacgtacaacatgacactcgcaaacgcgctacaagcctggacagtcctgaaaaaagcaggtaagctgttcaaaggtattggcaacgctgacattgtgggtaaagacggcaaagtggacggtaagaaagcaatgctggtcctgttggacgctgttctggagaacgcaggttctgacgagatgacagctattgaggaactaatcttccgcaatactgttgttgtagttgatggcaaaccgcgtaagctgtctgactgtaaagaccaacacttcaacgcacatcgtagccatatcttcggtgtgcttaaggagggattggtatatcagttcgcggattttttcaaagggaatggcctgtcaggtctagcgggtctagccacgcccttgacgaaataaaacgcaagcaacagtcagggacgcaagaaactgactggttcgtttggcttcctattctcaagggtcatgtgacccttgcagaattaaagtcatcttacagcttgtgtgatttgtgcgacctgcatattgctattctggactatgccgagttagaggaaatccatggcgaccataatcgatagctttctggtaacgcttgagagtaaagctgatagttctggctttgacctcttcgaccagctgtcccgccgttttgtgattaccctcggcgatgtaatcaatcttgctgagcgtgccgctggtgcgctcggtaggatgtttgcgcctgcgttagaggctgacgtactcgccgccaagattaaaggcttcggctacgacgtcgaatcgacgtggaaaacgctgatggatatgtctttacaaatgggcacaccatttcaagaggcactcgacggctttactaaacttaaatcgtatggcgttgacccgttaaacggttcgctacaaatgctaaaaacaatcactgctgcaacaggcggtgatttggcacgcaccattgttgcgtatggccaggcgtctgctatgggttcattgcagggccaggaaaagaaccagttcattaacgccggtgttgacatctggggcgcattgtcccgctacactggtaagaagcttggcgagcttcaggatatgatgcggcagaagcaaatcactgccgacatactgactagcgcgctcaaacaagaagccgaacgtttaaaaccaattgcccacgaagtgtcacagacactcaaagctcagttaactaacctgggcacaatttggtatgctgctcgttctaagattgcccagaccagaatatgggatgaggtaactaaaggcgcgataggtatggttaagtcactcacagcagtgcttaacgataccacacttactgcggcgtttaaaaagttcgacgaagttgtattcaatacaattgaaaacgtaaaacgacttatctacgttatcggggataacttcccgttaatggtagctataacatcatacgcactgctatcacttattcccgtgctggcggcacttattccctggctagctaaggtcggcaacgcctttgtgggtttagctaccaaaatgcttatgaacccgctcacgtggtttgcactggctatcggcacagttgttgctgtactcactgacctcgacgacgctctggcaggacgtgagacagttgttaagtggtcaaaagatgttgtagccgcatggggaattgtcaagcagtatatagtagttattgcagactttattctgtcaatatttgacggtcgcttatggaacaaactcggtaactggtggcaaggtttccttgttgaagttaagcaaggcatagagcaaataaagctgtggttgtctgaagcgctttaccagctgcctggtggtaagttcctgatggcgttgtttggtaagctcgattctacactgggctttgctggcaacaaacttgtggcaggcgctgaagctactgctaatgctgtatcacctacaactgaacagggcggaagcttctggagtagggcactcaactggtctatgcgtaacttcaaccctattacaggggagatgacagctggaggccaggctatgcagtcagctataaatacagctaagcaaaaccaacaacagaacgcaactgttatccatcaggataatagcgttaaagttgatgctactattaccggtgtacagaacccacaagaagtaggtcgtgaggtcaacgaccaggtcaaacaggcgcagaaagagaatgctactgtaagggccaacaacaaaacggcggtaacacaatgagtgacatctttgctggaattactgatgctgccaacaacttgtaccaggacgcccgtgacagactcatgggcgacggtacaaccaccttacgcttccgcaactgcggaggcattaagatggatgctgtcaccaatgaggaacatcagtctgatcttgacatcgctgacaatgaacttgagtccggggctaaggcttcggaccatgctgcagtacaaccaaaagttattactgtaactggcgtggtagttggttatatcgacgagtcaattcaagagtcaacaattaaggatgtaaccggtctacggtctatggatttcttggatgatattcagcttccacaggtagtgtctactgcgcttgaaggaacaagggactttgctgttaacaagctagcatcctttatagactggggcggtttagacgctaccatttcacgctctttagttccatggcttcctgactttagtatagctgaacagcttaagtcttcggacaatatgaggattgaacaggtataccgtaccttgctggatttacagaaaaacgttatctactgtgacgttgacactggtatcttcaagtatacgaatatgcttttgaagtctgttcgtgttgtacaggagaaagacggttcagctacgtttacccttacgttccgtgaagtcatcgaagtgccgattgtagttacaaacgctgtagccgctaagtcgacaggtcgccctgctaataacggcactaagaaaagcggacgtgcacaaggacagggcgatgccaccagtaagaaggacataaacacaactacaccgattagcgagaaacgtgtaaacgataaccgcggttttggtgtaacactcggtgacatgtttggctttaacttacgaggcatattctgatgatatttaccacaactgctttccttgacattataggtaatgatggttctggtatttacgacttggaacctacctccgaaggtaagcaatcaatatcaatttctatcgctggatatacgtataacattgagttgtactataacacggtaggtcagctctggcaggctacagtgactgacatatcaagtaatgctgtactttgttccagttatgctttacaatatgggcgtattgcttttggtaactgggacacgcgtatagcgttgctggtaagtgacaaatcctccagccgcatcggtcctatgactacagatgacatgggaggacgttgcagtgtctacatcgtcgacaaaacagcctacccgtcagtttggccgcgcgttaaagcttgaggtcagcaacggtaaagatgaaggcataatcatctcaaatcttcgtgttacctttgacattcaaaagggtaacacgaagcatccgaataaagcgacaatcacagtgtttaacttgactgaatccaaccgttataagttggcgtcaggtacctgggattacgtccgtctctctgtgggttacggtcttgacaacatagtttatcgtttgatattcgaaggcgatattactcgtgctaacgaccaacgaaacggccttgacattcagactgttctcgaatgtggcgatgcccgtaaatcttacaacgatggctttgttaatacgacgctggctgctggttctacgtatgacagtgttgttgacgtttgcctggctagcatgccaaacgttgaagaagggtacgtctgccttaacagcaacaaaccagctttcctgagagcacgtactctgttcggacaaacgcacagcatactcgaccaggttgctgctgccaacaaggctacctggtctatacaagacaataaactcaatattattcctaacgactctgttactgactacgacgttgttgtgctgtcagaatcgtctggtatgattggtgctcctcgcggcacagacaaaggtcttgaggttacttgcaacctgaatccttctctggccatcggtggtcttgtacaagtaaattctatgtttacacagtacaacggacagtataaaatcgacactataagatttcggggtgataataaaccgaaaggaccgtggcgtgctgacttgacggttctcggtggacaatttgcgaagaaagttcgtcgactcaagaagccacgcaaactgtcgaagattgagtacgactatgttactgaacccggtgttgaccatacagtaggcggaggtagctgatgtcagctattgactataatacagcaacacttgatgaggccattgaggctgcactgtttgctgcaatgattggtaagcgccactgtttacctggccgcatagtatcgtttaacagcaacctacagactgttgttgttgaacctatggttagtgccgaaaacgaagatggttcaatgagaccactaccaccagcagctgatgttcctttattccagctaggcggtggtgattttgttataacgcttgaaccaaagaaaggcgacccgtgcttacttcttgttgccgacagatgtattgacgtatggtatgaactggctgaaaacgctataccaggtgacttccgacagaatgacctgtcagactgcttctgtcttgtgggcttcagacctaagcctctgaagataacaaactggatggaaggtgtaactatccgtaaggttgacggaagtcactatatcaatattaataatgctggcaaggtatcgataaaggctacagtagtggacttgcttgatacaccaacacttaatgcaccaaacacagaagccaagtttaaagaagttgacattggcggtgttaagttgtccaaacacagacaccaagaaaacggtgacggtggcggtattactaatggcccgcaaaactaggtaacccacaatgcgaactagacgactcgattcaaactgggactggaattttgggcgtggccgacttgactacgccgatacgtctgagtccattgaacaacgcatcgtgcagatactccgctgttatgctatggactgggtacatgacctggactatggcattgactggttcggactaatggagaagcctgttcgatgggctgacctggaggctgcaatcaagacagcaatacttgcggagtatggagttagttctatcgagagctttaccctaagcttcgaccctgactcacgtcacgctgtttattcggttgaggttaatgatatttaccacaacacaacctctattaacagaagtattaatttaaccggagaaaactgatgggctctgtaactagcacaggctatgttcccgtcaagctcgacgactggatcagcagattcgaaacgctcttccgtcgtgtgtacggcgcggatattgatttgtcagctaagtctgctgacggacaaatggttggtattctggcgcagatgtttgcagaccaggacgagcaagttgcaattctgttttctatgcttgaccctaaccaggcatctggtgtatacgtagaccagttccttgcctacgtagcgcttcagcgtaaaggcgagatgtcaacgctgttgaccagggttaagattgaaggtgaccgtaacactattatacgtactccttactatgtaactgacagctcgaataacgtgtaccagcttaactccactgttgcgctggatgataacggtgtagtcgaaacaagctttagttctgttaagactggtcgctttgtcgtacttgcaaacgatgagcttaaaccacagaccatcgtttctggtgtgcgtaaagttaccaacatgcaagtgtcgtctggcggtgcgtccactgagctcgactctgaggcaatagaccgtgcgtatagctcttacggcaaacctggcacgaacagcttagacggtattgttgctgagattcgtcagatgactgatgttatcgcgtgtaacggttacgagaacgaagaagatactcgggacccattaactggcttacctcctcacagtatacagattgttgtggatggtggttcgcctgcggctattgctgactgtatcttccgtcgtaagactaatggctgtaagcagattggcactgtgtcttatcagattacggataagtcaggtacacagcgcacaatgaaatggagtcagcctacttatgttgaggcttatgcttcacttgttgtagcccgtaaggaactgtttaccgacgtttccgaggaacttattaagaatgctattctgtccaaggtatacaatatcggtgaagaggtatcaacctatgaactgggccagctgattcaagaagcgaatggcgtaagccctaacttctacatcaagactttctttgtgggtaaatcagctaatccgtcgacagatacgattctgcgtatcactgctcttgagcgtgcaatattcactgcagaccgtatcactattgcagtggtgaatgctgatggctgaatatcataaactacttattcaacagtacgctgataagccaaaagctgttgcaactattaagggcttcgatgatgcaattcagggtatctgggacggagcccaacaagttgttgatagccttaatatcgataaagcttttggtaaaggtcttgataatgttgcagcccgcgttggtgcatctcgtgttcttaaaaaaggcgtagaccgtaagttcttcggctttaccaacaaagtaccagacgtgcttggtttcggcggttcgtctggtaataaaggtggcccgttctatcgctacggtgcatcagtatgggacccggtaattcttgacgacattgacctgcgtacttacatcaagatgaaaatctggaagaacatgcaagacggtactatgccgtatctaattgacttcctgattgaattcttcggaatgaataacttcgttataactgacaacgaagatatgacaatgactctggagatatacagtactctgacaccacttaagcaagtgctgattcagaactacgatatacttccgcgccccacaggggtgaagattgaacttaacacgagcgttgacgtcacggatagtctgtaccgttacgctactgtaaacttaccagcacaggtgaatgtatatggctgatgtacaaacaagacccgataacgacatcttcgccagctccgcgggtactggtgaactgctgccgttcggtgaccttgctcgtggctggggtgcaacccttggctactctgaaggtattcctccgatggagtggtttaactttatcggtaaccgtactgacaaaggtatccactacatccttcagcagggtgttgatatatgggtagaaactgagacctacccggttggtgcactggttaaagttaacgccgacaatatgctgtaccgttgtctggtgcagaacattaatatgccaccgtctgctaaccctacgcagtggcgccctgtactcgacctgactgcggcaactgcggcagcacgacaggttggtaaggcctctggtaacgtaatccaggtcggtgcatttgggttaggtggcaacgctgaggtagttactaatgctaacagcattgtaaacgacggtatctaccagcttccagcgtcaggtacgggcggacctactaacggcgttgagactgagattctgcatatcaactgggatgagaaaaacgcttcacagtggggacgcaccaagggtaagcgcgtaatagccatgcgtgagaaggttaacaatacctggggcggatggtcatactcttacgggcctgataataaacctacggcgtctgagctgggcattaaccaggacttcatccctatggatggttctgactcaatccgcggcaacttaggtactgtaggctggttacatattgcacgtactacttccgacttgctacgtgctgctaactccgccggtgtaggtactgttgagtattctggtaacatcgcaggcggtactgctgttcaggagttgctgacttcagtttctgtcgcggctaacagtaatgttgtcactgctgctcgctggggatctgtgcctatgtcgcacatccagcacatccttgtggctggtggtgctacacagattaacatggcagtatgtcgccctggtggtattgccgaccgccgtacagtagctttgcaggtggatggtcttaataaccgagtaactaccacaaatagctttattttatgcgagaatggtgttagagtatattcacctaacaacccgcagcctatcgatacttcagccggtaacgttcggggtattcgactcggcgctcgtattgctgctggtgtatccgagtcaacgttctaccctgggcatgtaatgactggctggcgcttcggcaataagaaagagctgcgcggtggttcatactggtcagcgccgttacagtattacatcaacggcacttggattaatgtaagcaacgtatcgtaaaggtttattatgactaagcataaggtgttccgtaactttactatgtaccatcctgaggtaacagaagagaacgagaacattgtaaatgctggtgcaatcttcctcaaggacgaggaaggtcgcgactggtacaatctcgcaaaagagttcgctgtcaaatacgaaggcgcaacgttcttgcaggtagataagaacggagttgtaattgctgctcataccgacccaactatgttccatcctgtgggttgcgatatggttgtaacgtacgacccgcccttcaacatcttcgagacggttggcgaatggctgtttgacggtaaagagtttacgcttaacgcaccaatgatgaaggagattgctcgtgagcgtaaagaacaagctctgtccatcgcttcgaccaaggtcagtgttttacgcgacacagttgatagtggcaatgctaccgatgaagaaaaagagctatttgctaaatggcgtgattacaggattgctgtcaatcgtcttgacattaaccttggttccgctatggttgttccacctatgccggagtaaaccatgcaactgtcatttttcaactttacagaatacaacccacaaaggacagcggagacacttccgctgattaagcaaggcgttgtattcatcaaggataacaatggtaatgactggcgcaagctggctaaagagctggctaagaataaagagctggttcattacattgttgtggacaagtacaatgctgttgccgcgtatgctaacgatcctacgctactgtttcctgttaattgcgatttgcatattgttgagtctgtccctgttgctaagtttgcggattgctattacgaatggtcgtacgttaatggcaagtttgttaagcactctgaactgcagaaggtgattgcagaagaacgcctgcaggaagaacaggcttgggttgaaggacaactcgacactgaagaagatgaggaacgtattatcgctctccataaattccgtgccgatttgttgctgcttgttatgtcagatgcgccgcatatcgactggcctatacgaccgtaactaattgctaccagcaagcttgtgcagttgctggtagtgtttcttttacgcttgagtcgtgctataatccactctgggtatacaataaaccggagatatgggatgtttgactacaacgacaagtcttcccttattggtcagtttgtggcttgggtaacaataacagtaagtactttatcactaagtgattggggtactcttatcggtatactcagttccttggtgatgctgattgttgttacgtataaccaaacacggcgaaccaaaattatgtcggattattacaatcgtaagaagccgatagaggatgaagtcgcatcgaaagaagaggtgttgcgtgagtctgaaatcagcagcgactaaaggaggttgcagcgtgctggctatcatcgggcttgtattgtcgatgacgagtacacatgtccgtactaataaagaaggtcttgaaataatcggtaatgcagaaggttgtatgcgcaacccgtatgtatgtcctactggttacttaacagttggcattggtagccgcatctacagcgatgagcccgctgtacggcgcgaaggcctgacagaccaggagattgctgaccgctgggtcaagaatattcaagaggccgaaaagtgtgttaacgactggtttcacggtaaagacatgaacaccaaccagttcagcgccatgacctctatggtatttaaccatggttgcactagactccgtaagaacaaggatggttcacctaccaaaatatatactgctgctcgtaaacaaaactggactgaaatgtgtaaccgcataacggactgggatatgggtggtaagtacaggggcttgacaatacgtaagcaaaaggaaaaagcgctatgtctaaaaccggtgcaataattgcagttattctcggcctcgccattgtgttcctgtctttgtgggtacgtgagctgaaaggcgatattaccgaccgcgacggtataatcaaacagcttaacaagactaatggcgagttgtctgctgctaatcaaacgctgattaattctgtaaaggatgaacgtgaggcctcagccaaacgcgccagtaagatagctgaacttgaacaacaactgcgtgataagaagggtaaatatgacgaagcgacaaaatatgattcgtgcgctaataccgttgctccttctgccgttcttgacctcatgcgctgataaacctgaagttgtttatgttgacaggatagtcaaggtttatccgcctggtgcctacttggttaaatgccataagcctgaattaaccggtaacacctggaaagcaataggtcagttagctattgaacgcggaacagctcttgatgattgtgcagacaagatggacagcataattaactggagtaacaaaggggccgagtgaaggcccctttatttattagcgttttcctttcagctcgttatactgcgcacatgcagcacacagcactgtaccgggtaaaagctgacgtcgtttttcttcaatgtcttccccacactggtagcacgtcagcgggcttactccggtgtatcttactcggttcgatagtgctgcgtcccgggcaacttgttcagcttcagaagccatatcagtaatgtccgatgtgcgcatagactcaatcattattttccctcttcttcacaatacagggtttctaattcatcgcatagctgttgcgtccagtaatcatcctcgccacgtatctggaagcacagcacaggaatatcctgtcgtaaaatatcgctcttgtaaatctttttggcaacagcttctggttcttcctggaatatcctcataaaccagtccaggcctgacgtgcagcctgaggcgtctagtatctccttcgcccttaacttaagcgtttcatctaccttatactctaaacctatattagacatatcatagacctttaattagtgcgcctctgcccagttactttctatcttagcatcagtaagaacaggtacacgaagcggtagcacagtttccatgacccgtacgaaatcatagaatccatcttctgcttgcttaccagctggtagagagaagttaagctcatcgtgtactgtcaggcgaggtacgccaatcacgtcgaagtaaccgtcttcataccctttcagcattgcagacttcatctggtctgctgacgacccttgcagcactcggttgattgccttgtgggtgtctgccagtttaatgttcgggccgtattcttgtcgtgcttcttcaaatggtaaaggcatcttaccgaatccgccacgttttgggacccatttgttgaaccacgtcttccggcccataaaggtttctacatacccctggctataacataagtcttcataatgcttcatggtagcaccaatgaatggtgcaccctgatgatacgccttcagaacaggttccgcttcttcaggcgtcatcgctaacttacgggcaagagcattaagcatcatgccatacaacaaaccaaagttaatggtcttagccggtttacgctctataacgtgacctgaggcttccttgataatatcgaccataacattgtggtaatctgcttccgggttagccgcgaaaattgctcgtaactcatcagcgcccgggccgactgcaaaatgcgccatgaatcgatattcaatttgggcgtagtctgctgatccccatcggtgtccgacatccggtacgaaacaagcacgaaggagtggtcccaatattttgtgtcgagacggtatattctgcagattagggtcagatgagctaaaccgaccactaacggttccaccgtcatcaccgcgcatttgatggaattgaccgtgaaggaagccatttgtattcatccccaatatatagccacgaataaacgtggactggattttttcataagacttaatctcagacaccagttccgcaaacggatggtgcaagcctgctaagaagtccgctgtaaacgacggattacccgccgctgttttgaagtactccagacctaaatggtcaaatgcaagtgctaaatcaggaccggagttaacgttaatgttaaagccaatctggtctttaatctgctggtgcattttccttatttcagcgctaagcgtatcatccgcctctttggctttgtcaaggtcaacacgcacacctgcaaaacgcatcttaagcattaatggaatgagcttgcactccatatagaatacgtctgttaaacaccagcgacttaacaaaggccactgggctttgataacgtgtattggtaagtcggcgtcagattcagcatagtaacccacaagacgaggaggcgttttgtagatgtactttctggcttcacctgttggcttacaaccataagcatctgaaatccattggtacatctcagctgagtctttaccttcgcctacatactttcgtccaagtccttcaagtgcaacacgcgcgcctgggtcgagtaatgcttccgcgaattgtacatccatgcacaatcctttgacttccacgccttctgctgcaagccagcccaagtcatatgtgatgttagcaccgactttaacttggttaggtcgcgagagttcgagccgaagccaaccaagtacttcctcagctggaaggttatcctcttcgccgagctcgtgtctgattgggtagtaagccttgaagccattgtccgtagcgatactaactccaacgatatgaccttccctcctggcccaaccactaccatttgcatccatccctgggtcatatgtttcacagtcaagaccgataatcttcgcagaagacaaatccgggtaatgcgcgcgcggccgccatccagtatccctgacgtatggtataggacggttgataggtttaacattctttgcaccttcaaagctatcgaataaaaagctcatcagtcccctctcacatacgcaattacaactgtacgagttgagttttccattttgagcgcctgactaccaagccctattctttccatgcctttagccagtttactcatctgactaataacacagttgaacggtttactaaacttagtcgactggaacttaatgtcgacggacatcttaggaataatcttgtctggtaagtctgcttttgctgttgactcgccagttatctccagaatggcttgaccttcgtcatacccagtaagctggtccataacttccaggaattcaggagtgatggcctgcatatccatttccatattgaagaacttcgatacgtctggccatttggctgcgagtaccggagcatccatctgtacgccatccgcaaagccaaagaacatctgaccgcgggcatatcctacgcttgtgggttccatcttcagcttaaccaaggcctcaagcattggcttggctatggcacattcaaattcaaaatctacgttcaacttctcgcgtatcatatacttgccgttagtggcgtaagcataaccatcgcgcaaaagtaaagatgttgcccatacctgcggtgcttcgttaggtacccatttggccagggcagttagcaccgggagtaattcgccatgcgctgaataccagttgttaactgtagcaagcggcggtattggttcattaagcgcttgcattcttgttttaagtacgcctgctgtgaccgtgaggtttccagcggctgtaatgttaaaagtaatctgttcagttcttgccgcattaacggccttacgaaatgattcagcatccacttgcaggtctgggaatcctttacatggcgctcgtagtaatacgttcttgtagtatgaatggattgtttcgtttgcaatccatattttgcccataagaccgctatcagtatacttgatgggacgagcttgttgaacggcaatctgtatttgtttggtgtcatagttaaacttgctcatagtataacggggccgaagccccgctccatcttatacggccatttggagtttgatgtttggcattggtttgtacttctcaaccattggcgcaacatcggcaggagtgaagtcaaatactgacacgtcgtaaatcgcgttaatgtcaggacgaccttcaaagttagtgtccagtgtagtatcagaattgcttacgatacgttgcaggaaaatctttgccgcatcgatatgattctgatagatgtgatagtcacccagcgtaacagtcatatcacctaccccagtacccagctcagcagcaatggtaatctgcaacatctgatgaagcaggatgtcatgtggcagaccaaggataacgtccgcactacgcatatggaacatcagctctaattcattacggttgttaatgaacagctgaaaaccatggtaacaaggcggaagggccatagcatccatctcttgtgggttccatgccgtaatgtacgcccggcggtcagtaggcttaaccttcagcgtttcaataacgtctttaagctggttagtaagaacaccattcttatagaaaggcttaatccattgcacgccgtacacaggacctaagtcacggttgtctggtgtaccccaacgtttgtttgcgtcctgcaggttaccttcccaccagttgcagccaaagcctttgagcgtgtcgacgtttgaaatgccgttgataaagcagtaaagctcagcagcaacagctttgatgttaacaggtttaaacaccggcaccatcagtttgttgtcgttgaaagccagtttaaacgccgtaccaaaacaacggcgggtaccaacacctgtacggtctacaacatcctcgcctttacgcaagataaaagaaatgatgtcgctgtaaagagaatctacagtgctgtatgttttcattaaaacagttccttttgagccgggttaacgtgtgcgtcgataatggcctggatgtcaggtgctttccatccttcaggcttaacaatatcctgactagacttatgcttgctgttgcttgcatcaggcttagcgcgttctttcgccatgttagcagcctgtaccgcatcccatgctgcgtcaagtggccagttgttgtttgcacaccaggtaatcaggtggataattaactgggccagacggtcgcaatgagtgtcttcagtatccttaacgtatacaataaggccatcagcatcgaaacggtccataaatccgcatggcgtagttaacagaatcggatactcaaattcgttggtgaaccatgcagtctggtcatacaggtataacgtacctgcagcaatgtaaattaaatctacaataccatctaagaagccagctttgtcgccgtctttcttagcttgtttaatttcttccatctcctcaataagacggtcatagcgaagcttgaactctggcttaccgccctgactaattggcttgaggtcaaacttctcgtggaaagctgtaacgcctgcagcaattttactgaatcgcatttcttaactccttacaaacagtttcgataaacttacgttttgtttcagtagaccagattatatgtcgggccttctctaatacgtcccaacggtctttacccacaggaaaggggacaatgaaaagtccggtgcgagatatacgcttgataaacgggaacttgcaacgcatggttgtttcaaatttgataaagttattttgcgcttcgcgtgtaaatttaaccttatcaaattcatgctcgagtgtttgagcaaggttgcatacctcatggaaagaggatgcaggcaggtagtcttcacgaccgacagtgtttacgtagtcaatttgaccttcaagacgaagtatccaaattctataataagcttcagcgacacgttgtagattcattgtatctctcctctaaaagataacttattataccacatcactctctagtggtaaagcactttttatgcttcgggtaaaataaaaaggaccagcgttaactggtccttttggcagggtggcgtaaggagatacaaggaatcgcagttatgcaaccaggcagcgcatatgagattggctaaaggactgaccgacttaatccccgcgacgagtcagaaaggaggtaccgtcgagtagccaatcacatatgcgttacttgctgtgtgctctcaccgcggaaagtatagagcgttgcacttatcataccgatggagtggcaaaagcacacagcaagtacaaccttagttgtggtgtcttagcacctgagttattgtggataacctgcacccgacgggtgtcaaaaagatacgccaaaacaccacaactaaaattgtgaccgccgtctacaccaggcgcctggggtcaaggtagcgagccaatacccttttcagcgttggaggaatcgaacctcacacatcacggcttttaccaaatctcggtcagcgagcagaattgaactgcattcactggacaccctcactgtttcaacacaccaggcttaattgattgttgataagaagagagatgtaaggatgtccattgaatgcacctccgtagaggtgcgttcagatcagcgctattattcagcaacttcttcgttgtcgccttcgatcgcgccagccagtttagcagcttcagctttagcagcttctgctttctggcgagctttttcagctttctcttcagctttgcgaatctgctcagcagctttcgcttcggctttttcagctttgatgcgagcacgctcttcagctttacgctgtttttcagcggctttagcagcatcgcgttctgctttagcggtatcaacacgcttagccagaactttaccagtggctttacgccagtaggtcagctgggaagaaacagtaccacgggacatttcggtagtggcaacaacttcgtccataacatcagagctggacttgccttcttcatgggctttatcagccaggtcccatacgtaacgtgcgccagtaccagctgccggatacagtacgccgttaacttcttctttaccagttacaaaagtcagtttctcgctcataattttttcctcgtctacagggcttaatgtttgttcgttacgtgagttaatatacgtcatttaaaagagtgtgtaaacacctttttttaacttttttcattagtgtctagaaaggcacatcatagtcaaaaagtttacatccggaagacaggactgccggcggtggtgttttgcctccggataatagacagcctcctgcctggaagctacggcagttcgcacagctcatatcctgcaggtatataataagctgccggcgaacgtgccgcggtaaagctttagcctgggttgctacccgttcaaatagttctctgtcatcgagcgccatatccgtttccccagtcgtagttcatgatttgtgggtagggtcgtttaatccataccttgatacgcttaggaatggccagctctcccttacggcgaataaactcatcgcatgtttcaggcggttctgttcctgcagcattacgccaccaggcatctgccatttgtttagcattgccatgggcctctatatttacccatgttgtatacacttccaggtttgagtagtacacaacctttatactgtcaggtcgtccctgcttctggaataaagaatagtttacaagcgtaacatctttatccacaacacgaagctgaccgttagtcattacctcttcttctgatgaagtgaaggcaatagcaggtccgttaactgtaaactcaaattcatgtccgcacatcggatatacaccattctcgtctggtgtacttcctttagccggatgtttacatgtacgagcagcatagccacttacctggtgacagatagggcactctttaccaccaggcgttttatctgaccgtttctttttcttcttaccaagacgtggcggaacagccgggtcatcaataggaccaaggtcaatggtattagatgtaaagtccataacaaggcagtcatgcttgccaggcgctgtacgtaatcctcgaccaagtatctgcacccacaaagcaacagacgtggacgggcgcaatatgccgagcatatcaatctcaggatagtcaaatcctgtagtcaatacgtttacgtttacacagacccgtgctcgtccgcttgtaaactcttccagtgcggcttcacgttctttctttgtaagaccgccatgcacaactacagtctgccaacctcgcagattaaactcgtctgctatgttgtgggcgtgctcaacactcgtggcaaatacaagaacatgattcctgtccttaccgtagtgcatcatctcacgaatagccgcgactgttatactatgctggttggctaccttctcaagctctgacgggatatagtcacccatcctttcgccaacattactggtgtcaatcttggttaacactttcttgttgaccaggcgtgacaggaagccttcatttaccagtctggtaaatgcgtcaggtgttgtaaggtcatagcagatgtcggtaaatataccgcagtcaagtaaatgaccccctgccaggcgatacggagttgctgtaagtcctgttacttttaccttaggattaagctctttgaagtgagcaataaccttacggtatgttgtttcagacttctcaggaacaagatgggcttcgtcaatgaatataagattgaacttacctgcttcttccaggttcttaatgattgactgtactgacgctacaacgatacggcctgaaaagtctttgtgtcctgcacctgaagagtagattgatactggtgcttgtggccagtggcgaacaattgctttggcgtcttgttctaccagctccttgacgtgcgtcaatataagaatacgctgacggggatagctggtaagaatatccttcatcaacataccaagcacaggtgatttacctgaacctgtcggcatgacaataagtggattaccactataagaattgaagtacgaccaccaagctgtgaccgcttcttgttgataccagcgagcttcaaaagccatttatcatctcctcattaactttatatattataccacttccttgtgataaagtatacttttattttaaggagagtttaacgggcttctcatcctgcgggaagacatcagcggggcgataatcatcacaagctgctaattgctcttcgattgtttcgagctctttctggtgcttgttacaataccacactttgccctgaagcggtttactatagcggcaggttctgcagttcctgtcgggcattgctcctttgtggcacaagtggtggtactcgcacattcctggcttgcactcccaccaaataggcgattcagaaatcttcggcatatccaaaccagattccgcatatacgacagcctctgctttgctcagttgtatatcactttcaagtaagtcaatctcgaccacttcaaaatac

SEQ ID NO: 3 - DNA, 53143 bp, unidentified
  source 1..53143: mol_type = genomic DNA; note = Found in a bacteriophage isolated from wastewater
cgcatctgcttttatctggaaccgttgggataactttaaatacggtgtacctgatacgtttaccatgtatcactggggtaatggtagtgcatggtcaggttaccagcctcgtgcttatttctccgcagcacgtggatggtatgagctagtaaaccgtggtaagccagttccgagtaagcttattgcttatgtggataactggtcaaaatggttgcttgacttcatggaaaggtcaggaggtgtgtcgccttctaacttcccgcaagaaggtgttgctctgccagtcccttcagacttcacaggtcacatgtgtggactatggcttgctggtgcagctatgtcagccctttgtgggtcaacagtatcaggacttgataagctgatggatatgcttgtcaatgagctagaagaccactatgacataactggtattccggggcatgtaatggatggtggttggtcgccagcgttacgccttgaaactggtaccggacctgaaagcaacgccatgtactatggtttttactctggcgaaatattacgagggttgggcttatacctgctgtacaaaaacaaaggggctaaagcagatatttatgatttaggcccgtaaccactatttacttaaccgaggcgccagcctataataagctggcgcacccaataagaggattctccagatggcaaatcgtacaacagccaaccgtcctgttaaagacgcagacctgcgtcaagagtcggttactcagttcccgttagccaagccgaccaagcttgatgagaacggaaaattcattccaaccccagttaccggtgtaactgctacccctaaagctaagtcaattgctgttggtgagtttactactctgacagcagcagtagccccggcagacgcagatgacgtcaccgtgttgtgggaaagcgatacgcctgctaatgccactgttgatggttcaggtcgtgttcagggtatcaaagtaggttcagcaactattactgctaaatccaagcttgaccctgccaaaaccgataccgtagcaattacggtaactgctccgcctgtagccgtcactggtgttacgttagcgcctaagtcgcccagtgttgtagtaggctctactgtacagctgactgcaactgtgctgcctgctggcgctactaacaaagctgttacctacgaatcaaacgatcaggctaaagctaccgttagcgcaacgggtctggtgactggtaaagcagctggcgtcgtcaccatcactgtcaaaacagctgatggcagcgtcactgacactgtgtcagtaactgttactgctgagtaaggagctgattgatgtcgcttccacttaatgaggttgtcgacgtccagttcagtaagagcaacgggggtaaaggttttacccccaatgttccgctggaaggtataatgctttccaactacgagtactcaatcgttgcgggtgatgaccctgttcagctagttgtgcgttacattccaaacaacgctactgagcggggtatggcatggaaatctagcgacccggacgttatcactgttgatgagctcggatttgtgaagccactggcggaaggtgttgcatacgtgactggtacgtctgttgacggcggttatactgtacgagcaaagtttaacattgctcgggcacctatccttgttgaatctgttacagtgtctcccacaagtgtgacgcttgaagagggcaagactcaacgtctgacatacacctatttacctactaatgcagataatcctgatttctactggatttcagatgatgagtctgttgctgtcgttagcgacagcgggcttgtcactgccattggagatggtgaaacaactgtaaacgtacagtacggtgttgacagctctatattcgatagctgtacagtaactgttattcctcctgttgtgcacgttacaggagttgagtttcttactcagtcgcctcttaacgttaatatcggaagcacagctgggactagtattcgtatattgccagaagacgccactgacaaaacagtgacgtatgaaagcagtgcgcctgatgtagcaactgtggatactgacggaaatgttactggtgttatagttggtaatgccactgtgactgttaagacgaatgacggtgataagactgacactcttgatattatagtcagagtgcctgctgtaaatgttaccggtgtaagtattgacgaaggcgatacagcttccatggaagttggtgacactcttcagctacatgccactgtgactcctgaaaatgctactgacccatctgttgtatggagtgctcctgtatcagaagttgcgtctgtgactgaagctggtttggtaaccgctaacgctgcaggcttaatcgatgttactgttatcactaatgacgggaactttactgacagaatcgaggttaaagttacagaccccagaatcgcagttacggatgttgcatgggctcctgactctccgactaaagtaagtgccggccatcaggtgcagactaaaattgttataacacctgacaacgcaaccaacaaaaaagttagctacaatagctcaaacccagacgctattactgttgacactaacggagttatatacggtcaatcgcctggaacttcgactattacagttacaacagacgacggtggacttgttgcctcatttgtagcgacttgcacagaggtggctgttattacaccagatggtcttggtggtattccaattggtggtactcagcagttcacttatactgttagtccgtctgacgctgagctgactaatattcgttatgagtctgctgacccagctattgcaactgttgattcgtctggcgttgtaactggtgttgctagcggcggatgtaacatctggatttacgcaactagcaatggtgctgacattagcgcagctacttgggcacaaatttctgagaaggtacaggtctaccctcagtataccgaatggcttgtgggtaacaccaaacagcttgatgttaagatttatccgtctgactctaagagcgttaccgttacttatgaatcgtcagatgacactatcattagtgtagatgcaaatggcttgatgactgctaagtctgaaggttcagcaactattactgctaacgttgtgatgaacggtgttgctgcttctggcacaacatctccttacgtgtctgagctttctgttactactgactcgttgcctgcactcactgttggtaacacgcaacagctggttgtaactgttagacctgaatacgctaagacagacccaggatataacattcagtatacaactacagacgatactgtcgctactgtaagtaataccggtgttattactggcgttggtaacggtggatgtcgtattggtgccacagtaactgtgagaaacgctacagcgtcggacagctcttatcagtccgtcgatgcagcataaaattaattaactttgcactggccatttacttggttaaacttactgggtataatggccggaaagtccacccaagaggtaaacaaaaatgccgttgaatgtaaaccagattgtaaacgttcaactgaacaacactccaactggtatcagcaaaggtgacttcggtaagctggctcttttaactcaggatcctggcactgcttttcctgacagcgacaacggacactatgttgaaatcggcagctactctgaagccgagtcttattggggtactggttcagttgtacttggcgcgctgaagattttctttgcacaatctccgcgtcctcgttcagtagttatcgcctcatggagcaacaccgctactctggatgcggctattaaagcattcaacgatgtgtatcctgactggtatgttctgcgtccgcttccgcctactggcgagctgtctgacgacgacatcagtttgctggcgtcaactgttgctgcttacgacaaaaaacgttgcagctatacgactactaaagcaactcatattgaaaacagcgactccaacccgattaaagttctggctggtaaaggctacaacaatatgtggcttcagtacgataagaacaaccaacactatgcagacatttctgctatggcgcgtgctctgtctgttaacttctctggtaaccgcactacgattaccatgaagttcaaacaagagcctggtattacaccgaacaacactttaacgctcactgaagctaacaagtgtaaagcgctgggtattaactggtacacctactacagcacctttgctatgcttgcagaaggtactgtcctcggtacgtccaagccgccacgcttctgggatgaagtacatggtctcgactggttctgtaatgctgtccaggcttacgtcttcaactcaatcgctacgtcacccacgaaggtgccgcagacgaacaaaggtcacgagcgccttaccggtgctgcagctgttgcttgtcagcaggctgtcgacaacggcttggttgcgcctggtatctggtacggtgatgagtttggtacactgtcttatggtgaccgactcgaaacaggtttctacatctacatccctgacgtagatgaccagcctctggatgagcgtgaagctcgtcaggccgttgtaatgcaaatcgcgattaagctggctggtgcaatccactccagcgacatcctgattaacttcactcgctaaggagcagatcaatgatcatcgattcttctgaatgcgtgttgagcctgaatggtgttcagctgtccgactgggcagacggtgccgatgtcattgacgtgcaatgggtggacccggcttccacctatcttgcaggtgcagatggcaatggcattcagattatgaacccgtccaaagccattaagctaactatcaaggttaagcaaaatggtccggatgccaaatggcttaacgaccagtacaacctgcagcgtaacaacattcgtggatttgtcccgtttgtgctgcaagccaaagacctgttaaaccaggatttggcatggggtaaaaaaggttactttaccgatggttccccgtggactcgcggtaacggccataacccgactaccttcgctattgtgttccaccaaggtggtatgcagttgactgaaggctttgaccagtaacaatagaggaaagcacaaatgactgagcccaaatcatttgacatcgacgacgtaacgtacaacatgacactcgcaaacgcgctacaagcctggacagtcctgaaaaaagcaggtaagctgttcaaaggtattggcaacgctgacattgtgggtaaagacggcaaagtggacggtaagaaagcaatgctggtcctgttggacgctgttctggagaacgcaggttctgacgagatgacagctattgaggaactaatcttccgcaatactgttgttgtagttgatggcaaaccgcgtaagctgtctgactgtaaagaccaacacttcaacgcacatcgtagccatatcttcggtgtgcttaaggagggattggtatatcagttcgcggattttttcaaagggaatggcctgtcaggtctagcgggtctagccacgcccttgacgaaataaaacgcaagcaacagtcagggacgcaagaaactgactggttcgtttggcttcctattctcaagggtcatgtgacccttgcagaattaaagtcatcttacagcttgtgtgatttgtgcgacctgcatattgctattctggactatgccgagttagaggaaatccatggcgaccataatcgatagctttctggtaacgcttgagagtaaagctgatagttctggctttgacctcttcgaccagctgtcccgccgttttgtgattaccctcggcgatgtaatcaatcttgctgagcgtgccgctggtgcgctcggtaggatgtttgcgcctgcgttagaggctgacgtactcgccgccaagattaaaggcttcggctacgacgtcgaatcgacgtggaaaacgctgatggatatgtctttacaaatgggcacaccatttcaagaggcactcgacggctttactaaacttaaatcgtatggcgttgacccgttaaacggttcgctacaaatgctaaaaacaatcactgctgcaacaggcggtgatttggcacgcaccattgttgcgtatggccaggcgtctgctatgggttcattgcagggccaggaaaagaaccagttcattaacgccggtgttgacatctggggcgcattgtcccgctacactggtaagaagcttggcgagcttcaggatatgatgcggcagaagcaaatcactgccgacatactgactagcgcgctcaaacaagaagccgaacgtttaaaaccaattgcccacgaagtgtcacagacactcaaagctcagttaactaacctgggcacaatttggtatgctgctcgttctaagattgcccagaccagaatatgggatgaggtaactaaaggcgcgataggtatggttaagtcactcacagcagtgcttaacgataccacacttactgcggcgtttaaaaagttcgacgaagttgtattcaatacaattgaaaacgtaaaacgacttatctacgttatcggggataacttcccgttaatggtagctataacatcatacgcactgctatcacttattcccgtgctggcggcacttattccctggctagctaaggtcggcaacgcctttgtgggtttagctaccaaaatgcttatgaacccgctcacgtggtttgcactggctatcggcacagttgttgctgtactcactgacctcgacgacgctctggcaggacgtgagacagttgttaagtggtcaaaagatgttgtagccgcatggggaattgtcaagcagtatatagtagttattgcagactttattctgtcaatatttgacggtcgcttatggaacaaactcggtaactggtggcaaggtttccttgttgaagttaagcaaggcatagagcaaataaagctgtggttgtctgaagcgctttaccagctgcctggtggtaagttcctgatggcgttgtttggtaagctcgattctacactgggctttgctggcaacaaacttgtggcaggcgctgaagctactgctaatgctgtatcacctacaactgaacagggcggaagcttctggagtagggcactcaactggtctatgcgtaacttcaaccctattacaggggagatgacagctggaggccaggctatgcagtcagctataaatacagctaagcaaaaccaacaacagaacgcaactgttatccatcaggataatagcgttaaagttgatgctactattaccggtgtacagaacccacaagaagtaggtcgtgaggtcaacgaccaggtcaaacaggcgcagaaagagaatgctactgtaagggccaacaacaaaacggcggtaacacaatgagtgacatctttgctggaattactgatgctgccaacaacttgtaccaggacgcccgtgacagactcatgggcgacggtacaaccaccttacgcttccgcaactgcggaggcattaagatggatgctgtcaccaatgaggaacatcagtctgatcttgacatcgctgacaatgaacttgagtccggggctaaggcttcggaccatgctgcagtacaaccaaaagttattactgtaactggcgtggtagttggttatatcgacgagtcaattcaagagtcaacaattaaggatgtaaccggtctacggtctatggatttcttggatgatattcagcttccacaggtagtgtctactgcgcttgaaggaacaagggactttgctgttaacaagctagcatcctttatagactggggcggtttagacgctaccatttcacgctctttagttccatggcttcctgactttagtatagctgaacagcttaagtcttcggacaatatgaggattgaacaggtataccgtaccttgctggatttacagaaaaacgttatctactgtgacgttgacactggtatcttcaagtatacgaatatgcttttgaagtctgttcgtgttgtacaggagaaagacggttcagctacgtttacccttacgttccgtgaagtcatcgaagtgccgattgtagttacaaacgctgtagccgctaagtcgacaggtcgccctgctaataacggcactaagaaaagcggacgtgcacaaggacagggcgatgccaccagtaagaaggacataaacacaactacaccgattagcgagaaacgtgtaaacgataaccgcggttttggtgtaacactcggtgacatgtttggctttaacttacgaggcatattctgatgatatttaccacaactgctttccttgacattataggtaatgatggttctggtatttacgacttggaacctacctccgaaggtaagcaatcaatatcaatttctatcgctggatatacgtataacattgagttgtactataacacggtaggtcagctctggcaggctacagtgactgacatatcaagtaatgctgtactttgttccagttatgctttacaatatgggcgtattgcttttggtaactgggacacgcgtatagcgttgctggtaagtgacaaatcctccagccgcatcggtcctatgactacagatgacatgggaggacgttgcagtgtctacatcgtcgacaaaacagcctacccgtcagtttggccgcgcgttaaagcttgaggtcagcaacggtaaagatgaaggcataatcatctcaaatcttcgtgttacctttgacattcaaaagggtaacacgaagcatccgaataaagcgacaatcacagtgtttaacttgactgaatccaaccgttataagttggcgtcaggtacctgggattacgtccgtctctctgtgggttacggtcttgacaacatagtttatcgtttgatattcgaaggcgatattactcgtgctaacgaccaacgaaacggccttgacattcagactgttctcgaatgtggcgatgcccgtaaatcttacaacgatggctttgttaatacgacgctggctgctggttctacgtatgacagtgttgttgacgtttgcctggctagcatgccaaacgttgaagaagggtacgtctgccttaacagcaacaaaccagctttcctgagagcacgtactctgttcggacaaacgcacagcatactcgaccaggttgctgctgccaacaaggctacctggtctatacaagacaataaactcaatattattcctaacgactctgttactgactacgacgttgttgtgctgtcagaatcgtctggtatgattggtgctcctcgcggcacagacaaaggtcttgaggttacttgcaacctgaatccttctctggccatcggtggtcttgtacaagtaaattctatgtttacacagtacaacggacagtataaaatcgacactataagatttcggggtgataataaaccgaaaggaccgtggcgtgctgacttgacggttctcggtggacaatttgcgaagaaagttcgtcgactcaagaagccacgcaaactgtcgaagattgagtacgactatgttactgaacccggtgttgaccatacagtaggcggaggtagctgatgtcagctattgactataatacagcaacacttgatgaggccattgaggctgcactgtttgctgcaatgattggtaagcgccactgtttacctggccgcatagtatcgtttaacagcaacctacagactgttgttgttgaacctatggttagtgccgaaaacgaagatggttcaatgagaccactaccaccagcagctgatgttcctttattccagctaggcggtggtgattttgttataacgcttgaaccaaagaaaggcgacccgtgcttacttcttgttgccgacagatgtattgacgtatggtatgaactggctgaaaacgctataccaggtgacttccgacagaatgacctgtcagactgcttctgtcttgtgggcttcagacctaagcctctgaagataacaaactggatggaaggtgtaactatccgtaaggttgacggaagtcactatatcaatattaataatgctggcaaggtatcgataaaggctacagtagtggacttgcttgatacaccaacacttaatgcaccaaacacagaagccaagtttaaagaagttgacattggcggtgttaagttgtccaaacacagacaccaagaaaacggtgacggtggcggtattactaatggcccgcaaaactaggtaacccacaatgcgaactagacgactcgattcaaactgggactggaattttgggcgtggccgacttgactacgccgatacgtctgagtccattgaacaacgcatcgtgcagatactccgctgttatgctatggactgggtacatgacctggactatggcattgactggttcggactaatggagaagcctgttcgatgggctgacctggaggctgcaatcaagacagcaatacttgcggagtatggagttagttctatcgagagctttaccctaagcttcgaccctgactcacgtcacgctgtttattcggttgaggttaatgatatttaccacaacacaacctctattaacagaagtattaatttaaccggagaaaactgatgggctctgtaactagcacaggctatgttcccgtcaagctcgacgactggatcagcagattcgaaacgctcttccgtcgtgtgtacggcgcggatattgatttgtcagctaagtctgctgacggacaaatggttggtattctggcgcagatgtttgcagaccaggacgagcaagttgcaattctgttttctatgcttgaccctaaccaggcatctggtgtatacgtagaccagttccttgcctacgtagcgcttcagcgtaaaggcgagatgtcaacgctgttgaccagggttaagattgaaggtgaccgtaacactattatacgtactccttactatgtaactgacagctcgaataacgtgtaccagcttaactccactgttgcgctggatgataacggtgtagtcgaaacaagctttagttctgttaagactggtcgctttgtcgtacttgcaaacgatgagcttaaaccacagaccatcgtttctggtgtgcgtaaagttaccaacatgcaagtgtcgtctggcggtgcgtccactgagctcgactctgaggcaatagaccgtgcgtatagctcttacggcaaacctggcacgaacagcttagacggtattgttgctgagattcgtcagatgactgatgttatcgcgtgtaacggttacgagaacgaagaagatactcgggacccattaactggcttacctcctcacagtatacagattgttgtggatggtggttcgcctgcggctattgctgactgtatcttccgtcgtaagactaatggctgtaagcagattggcactgtgtcttatcagattacggataagtcaggtacacagcgcacaatgaaatggagtcagcctacttatgttgaggcttatgcttcacttgttgtagcccgtaaggaactgtttaccgacgtttccgaggaacttattaagaatgctattctgtccaaggtatacaatatcggtgaagaggtatcaacctatgaactgggccagctgattcaagaagcgaatggcgtaagccctaacttctacatcaagactttctttgtgggtaaatcagctaatccgtcgacagatacgattctgcgtatcactgctcttgagcgtgcaatattcactgcagaccgtatcactattgcagtggtgaatgctgatggctgaatatcataaactacttattcaacagtacgctgataagccaaaagctgttgcaactattaagggcttcgatgatgcaattcagggtatctgggacggagcccaacaagttgttgatagccttaatatcgataaagcttttggtaaaggtcttgataatgttgcagcccgcgttggtgcatctcgtgttcttaaaaaaggcgtagaccgtaagttcttcggctttaccaacaaagtaccagacgtgcttggtttcggcggttcgtctggtaataaaggtggcccgttctatcgctacggtgcatcagtatgggacccggtaattcttgacgacattgacctgcgtacttacatcaagatgaaaatctggaagaacatgcaagacggtactatgccgtatctaattgacttcctgattgaattcttcggaatgaataacttcgttataactgacaacgaagatatgacaatgactctggagatatacagtactctgacaccacttaagcaagtgctgattcagaactacgatatacttccgcgccccacaggggtgaagattgaacttaacacgagcgttgacgtcacggatagtctgtaccgttacgctactgtaaacttaccagcacaggtgaatgtatatggctgatgtacaaacaagacccgataacgacatcttcgccagctccgcgggtactggtgaactgctgccgttcggtgaccttgctcgtggctggggtgcaacccttggctactctgaaggtattcctccgatggagtggtttaactttatcggtaaccgtactgacaaaggtatccactacatccttcagcagggtgttgatatatgggtagaaactgagacctacccggttggtgcactggttaaagttaacgccgacaatatgctgtaccgttgtctggtgcagaacattaatatgccaccgtctgctaaccctacgcagtggcgccctgtactcgacctgactgcggcaactgcggcagcacgacaggttggtaaggcctctggtaacgtaatccaggtcggtgcatttgggttaggtggcaacgctgaggtagttactaatgctaacagcattgtaaacgacggtatctaccagcttccagcgtcaggtacgggcggacctactaacggcgttgagactgagattctgcatatcaactgggatgagaaaaacgcttcacagtggggacgcaccaagggtaagcgcgtaatagccatgcgtgagaaggttaacaatacctggggcggatggtcatactcttacgggcctgataataaacctacggcgtctgagctgggcattaaccaggacttcatccctatggatggttctgactcaatccgcggcaacttaggtactgtaggctggttacatattgcacgtactacttccgacttgctacgtgctgctaactccgccggtgtaggtactgttgagtattctggtaacatcgcaggcggtactgctgttcaggagttgctgacttcagtttctgtcgcggctaacagtaatgttgtcactgctgctcgctggggatctgtgcctatgtcgcacatccagcacatccttgtggctggtggtgctacacagattaacatggcagtatgtcgccctggtggtattgccgaccgccgtacagtagctttgcaggtggatggtcttaataaccgagtaactaccacaaatagctttattttatgcgagaatggtgttagagtatattcacctaacaacccgcagcctatcgatacttcagccggtaacgttcggggtattcgactcggcgctcgtattgctgctggtgtatccgagtcaacgttctaccctgggcatgtaatgactggctggcgcttcggcaataagaaagagctgcgcggtggttcatactggtcagcgccgttacagtattacatcaacggcacttggattaatgtaagcaacgtatcgtaaaggtttattatgactaagcataaggtgttccgtaactttactatgtaccatcctgaggtaacagaagagaacgagaacattgtaaatgctggtgcaatcttcctcaaggacgaggaaggtcgcgactggtacaatctcgcaaaagagttcgctgtcaaatacgaaggcgcaacgttcttgcaggtagataagaacggagttgtaattgctgctcataccgacccaactatgttccatcctgtgggttgcgatatggttgtaacgtacgacccgcccttcaacatcttcgagacggttggcgaatggctgtttgacggtaaagagtttacgcttaacgcaccaatgatgaaggagattgctcgtgagcgtaaagaacaagctctgtccatcgcttcgaccaaggtcagtgttttacgcgacacagttgatagtggcaatgctaccgatgaagaaaaagagctatttgctaaatggcgtgattacaggattgctgtcaatcgtcttgacattaaccttggttccgctatggttgttccacctatgccggagtaaaccatgcaactgtcatttttcaactttacagaatacaacccacaaaggacagcggagacacttccgctgattaagcaaggcgttgtattcatcaaggataacaatggtaatgactggcgcaagctggctaaagagctggctaagaataaagagctggttcattacattgttgtggacaagtacaatgctgttgccgcgtatgctaacgatcctacgctactgtttcctgttaattgcgatttgcatattgttgagtctgtccctgttgctaagtttgcggattgctattacgaatggtcgtacgttaatggcaagtttgttaagcactctgaactgcagaaggtgattgcagaagaacgcctgcaggaagaacaggcttgggttgaaggacaactcgacactgaagaagatgaggaacgtattatcgctctccataaattccgtgccgatttgttgctgcttgttatgtcagatgcgccgcatatcgactggcctatacgaccgtaactaattgctaccagcaagcttgtgcagttgctggtagtgtttcttttacgcttgagtcgtgctataatccactctgggtatacaataaaccggagatatgggatgtttgactacaacgacaagtcttcccttattggtcagtttgtggcttgggtaacaataacagtaagtactttatcactaagtgattggggtactcttatcggtatactcagttccttggtgatgctgattgttgttacgtataaccaaacacggcgaaccaaaattatgtcggattattacaatcgtaagaagccgatagaggatgaagtcgcatcgaaagaagaggtgttgcgtgagtctgaaatcagcagcgactaaaggaggttgcagcgtgctggctatcatcgggcttgtattgtcgatgacgagtacacatgtccgtactaataaagaaggtcttgaaataatcggtaatgcagaaggttgtatgcgcaacccgtatgtatgtcctactggttacttaacagttggcattggtagccgcatctacagcgatgagcccgctgtacggcgcgaaggcctgacagaccaggagattgctgaccgctgggtcaagaatattcaagaggccgaaaagtgtgttaacgactggtttcacggtaaagacatgaacaccaaccagttcagcgccatgacctctatggtatttaaccatggttgcactagactccgtaagaacaaggatggttcacctaccaaaatatatactgctgctcgtaaacaaaactggactgaaatgtgtaaccgcataacggactgggatatgggtggtaagtacaggggcttgacaatacgtaagcaaaaggaaaaagcgctatgtctaaaaccggtgcaataattgcagttattctcggcctcgccattgtgttcctgtctttgtgggtacgtgagctgaaaggcgatattaccgaccgcgacggtataatcaaacagcttaacaagactaatggcgagttgtctgctgctaatcaaacgctgattaattctgtaaaggatgaacgtgaggcctcagccaaacgcgccagtaagatagctgaacttgaacaacaactgcgtgataagaagggtaaatatgacgaagcgacaaaatatgattcgtgcgctaataccgttgctccttctgccgttcttgacctcatgcgctgataaacctgaagttgtttatgttgacaggatagtcaaggtttatccgcctggtgcctacttggttaaatgccataagcctgaattaaccggtaacacctggaaagcaataggtcagttagctattgaacgcggaacagctcttgatgattgtgcagacaagatggacagcataattaactggagtaacaaaggggccgagtgaaggcccctttatttattagcgttttcctttcagctcgttatactgcgcacatgcagcacacagcactgtaccgggtaaaagctgacgtcgtttttcttcaatgtcttccccacactggtagcacgtcagcgggcttactccggtgtatcttactcggttcgatagtgctgcgtcccgggcaacttgttcagcttcagaagccatatcagtaatgtccgatgtgcgcatagactcaatcattattttccctcttcttcacaatacagggtttctaattcatcgcatagctgttgcgtccagtaatcatcctcgccacgtatctggaagcacagcacaggaatatcctgtcgtaaaatatcgctcttgtaaatctttttggcaacagcttctggttcttcctggaatatcctcataaaccagtccaggcctgacgtgcagcctgaggcgtctagtatctccttcgcccttaacttaagcgtttcatctaccttatactctaaacctatattagacatatcatagacctttaattagtgcgcctctgcccagttactttctatcttagcatcagtaagaacaggtacacgaagcggtagcacagtttccatgacccgtacgaaatcatagaatccatcttctgcttgcttaccagctggtagagagaagttaagctcatcgtgtactgtcaggcgaggtacgccaatcacgtcgaagtaaccgtcttcataccctttcagcattgcagacttcatctggtctgctgacgacccttgcagcactcggttgattgccttgtgggtgtctgccagtttaatgttcgggccgtattcttgtcgtgcttcttcaaatggtaaaggcatcttaccgaatccgccacgttttgggacccatttgttgaaccacgtcttccggcccataaaggtttctacatacccctggctataacataagtcttcataatgcttcatggtagcaccaatgaatggtgcaccctgatgatacgccttcagaacaggttccgcttcttcaggcgtcatcgctaacttacgggcaagagcattaagcatcatgccatacaacaaaccaaagttaatggtcttagccggtttacgctctataacgtgacctgaggcttccttgataatatcgaccataacattgtggtaatctgcttccgggttagccgcgaaaattgctcgtaactcatcagcgcccgggccgactgcaaaatgcgccatgaatcgatattcaatttgggcgtagtctgctgatccccatcggtgtccgacatccggtacgaaacaagcacgaaggagtggtcccaatattttgtgtcgagacggtatattctgcagattagggtcagatgagctaaaccgaccactaacggttccaccgtcatcaccgcgcatttgatggaattgaccgtgaaggaagccatttgtattcatccccaatatatagccacgaataaacgtggactggattttttcataagacttaatctcagacaccagttccgcaaacggatggtgcaagcctgctaagaagtccgctgtaaacgacggattacccgccgctgttttgaagtactccagacctaaatggtcaaatgcaagtgctaaatcaggaccggagttaacgttaatgttaaagccaatctggtctttaatctgctggtgcattttccttatttcagcgctaagcgtatcatccgcctctttggctttgtcaaggtcaacacgcacacctgcaaaacgcatcttaagcattaatggaatgagcttgcactccatatagaatacgtctgttaaacaccagcgacttaacaaaggccactgggctttgataacgtgtattggtaagtcggcgtcagattcagcatagtaacccacaagacgaggaggcgttttgtagatgtactttctggcttcacctgttggcttacaaccataagcatctgaaatccattggtacatctcagctgagtctttaccttcgcctacatactttcgtccaagtccttcaagtgcaacacgcgcgcctgggtcgagtaatgcttccgcgaattgtacatccatgcacaatcctttgacttccacgccttctgctgcaagccagcccaagtcatatgtgatgttagcaccgactttaacttggttaggtcgcgagagttcgagccgaagccaaccaagtacttcctcagctggaaggttatcctcttcgccgagctcgtgtctgattgggtagtaagccttgaagccattgtccgtagcgatactaactccaacgatatgaccttccctcctggcccaaccactaccatttgcatccatccctgggtcatatgtttcacagtcaagaccgataatcttcgcagaagacaaatccgggtaatgcgcgcgcggccgccatccagtatccctgacgtatggtataggacggttgataggtttaacattctttgcaccttcaaagctatcgaataaaaagctcatcagtcccctctcacatacgcaattacaactgtacgagttgagttttccattttgagcgcctgactaccaagccctattctttccatgcctttagccagtttactcatctgactaataacacagttgaacggtttactaaacttagtcgactggaacttaatgtcgacggacatcttaggaataatcttgtctggtaagtctgcttttgctgttgactcgccagttatctccagaatggcttgaccttcgtcatacccagtaagctggtccataacttccaggaattcaggagtgatggcctgcatatccatttccatattgaagaacttcgatacgtctggccatttggctgcgagtaccggagcatccatctgtacgccatccgcaaagccaaagaacatctgaccgcgggcatatcctacgcttgtgggttccatcttcagcttaaccaaggcctcaagcattggcttggctatggcacattcaaattcaaaatctacgttcaacttctcgcgtatcatatacttgccgttagtggcgtaagcataaccatcgcgcaaaagtaaagatgttgcccatacctgcggtgcttcgttaggtacccatttggccagggcagttagcaccgggagtaattcgccatgcgctgaataccagttgttaactgtagcaagcggcggtattggttcattaagcgcttgcattcttgttttaagtacgcctgctgtgaccgtgaggtttccagcggctgtaatgttaaaagtaatctgttcagttcttgccgcattaacggccttacgaaatgattcagcatccacttgcaggtctgggaatcctttacatggcgctcgtagtaatacgttcttgtagtatgaatggattgtttcgtttgcaatccatattttgcccataagaccgctatcagtatacttgatgggacgagcttgttgaacggcaatctgtatttgtttggtgtcatagttaaacttgctcatagtataacggggccgaagccccgctccatcttatacggccatttggagtttgatgtttggcattggtttgtacttctcaaccattggcgcaacatcggcaggagtgaagtcaaatactgacacgtcgtaaatcgcgttaatgtcaggacgaccttcaaagttagtgtccagtgtagtatcagaattgcttacgatacgttgcaggaaaatctttgccgcatcgatatgattctgatagatgtgatagtcacccagcgtaacagtcatatcacctaccccagtacccagctcagcagcaatggtaatctgcaacatctgatgaagcaggatgtcatgtggcagaccaaggataacgtccgcactacgcatatggaacatcagctctaattcattacggttgttaatgaacagctgaaaaccatggtaacaaggcggaagggccatagcatccatctcttgtgggttccatgccgtaatgtacgcccggcggtcagtaggcttaaccttcagcgtttcaataacgtctttaagctggttagtaagaacaccattcttatagaaaggcttaatccattgcacgccgtacacaggacctaagtcacggttgtctggtgtaccccaacgtttgtttgcgtcctgcaggttaccttcccaccagttgcagccaaagcctttgagcgtgtcgacgtttgaaatgccgttgataaagcagtaaagctcagcagcaacagctttgatgttaacaggtttaaacaccggcaccatcagtttgttgtcgttgaaagccagtttaaacgccgtaccaaaacaacggcgggtaccaacacctgtacggtctacaacatcctcgcctttacgcaagataaaagaaatgatgtcgctgtaaagagaatctacagtgctgtatgttttcattaaaacagttccttttgagccgggttaacgtgtgcgtcgataatggcctggatgtcaggtgctttccatccttcaggcttaacaatatcctgactagacttatgcttgctgttgcttgcatcaggcttagcgcgttctttcgccatgttagcagcctgtaccgcatcccatgctgcgtcaagtggccagttgttgtttgcacaccaggtaatcaggtggataattaactgggccagacggtcgcaatgagtgtcttcagtatccttaacgtatacaataaggccatcagcatcgaaacggtccataaatccgcatggcgtagttaacagaatcggatactcaaattcgttggtgaaccatgcagtctggtcatacaggtataacgtacctgcagcaatgtaaattaaatctacaataccatctaagaagccagctttgtcgccgtctttcttagcttgtttaatttcttccatctcctcaataagacggtcatagcgaagcttgaactctggcttaccgccctgactaattggcttgaggtcaaacttctcgtggaaagctgtaacgcctgcagcaattttactgaatcgcatttcttaactccttacaaacagtttcgataaacttacgttttgtttcagtagaccagattatatgtcgggccttctctaatacgtcccaacggtctttacccacaggaaaggggacaatgaaaagtccggtgcgagatatacgcttgataaacgggaacttgcaacgcatggttgtttcaaatttgataaagttattttgcgcttcgcgtgtaaatttaaccttatcaaattcatgctcgagtgtttgagcaaggttgcatacctcatggaaagaggatgcaggcaggtagtcttcacgaccgacagtgtttacgtagtcaatttgaccttcaagacgaagtatccaaattctataataagcttcagcgacacgttgtagattcattgtatctctcctctaaaagataacttattataccacatcactctctagtggtaaagcactttttatgcttcgggtaaaataaaaaggaccagcgttaactggtccttttggcagggtggcgtaaggagatacaaggaatcgcagttatgcaaccaggcagcgcatatgagattggctaaaggactgaccgacttaatccccgcgacgagtcagaaaggaggtaccgtcgagtagccaatcacatatgcgttacttgctgtgtgctctcaccgcggaaagtatagagcgttgcacttatcataccgatggagtggcaaaagcacacagcaagtacaaccttagttgtggtgtcttagcacctgagttattgtggataacctgcacccgacgggtgtcaaaaagatacgccaaaacaccacaactaaaattgtgaccgccgtctacaccaggcgcctggggtcaaggtagcgagccaatacccttttcagcgttggaggaatcgaacctcacacatcacggcttttaccaaatctcggtcagcgagcagaattgaactgcattcactggacaccctcactgtttcaacacaccaggcttaattgattgttgataagaagagagatgtaaggatgtccattgaatgcacctccgtagaggtgcgttcagatcagcgctattattcagcaacttcttcgttgtcgccttcgatcgcgccagccagtttagcagcttcagctttagcagcttctgctttctggcgagctttttcagctttctcttcagctttgcgaatctgctcagcagctttcgcttcggctttttcagctttgatgcgagcacgctcttcagctttacgctgtttttcagcggctttagcagcatcgcgttctgctttagcggtatcaacacgcttagccagaactttaccagtggctttacgccagtaggtcagctgggaagaaacagtaccacgggacatttcggtagtggcaacaacttcgtccataacatcagagctggacttgccttcttcatgggctttatcagccaggtcccatacgtaacgtgcgccagtaccagctgccggatacagtacgccgttaacttcttctttaccagttacaaaagtcagtttctcgctcataattttttcctcgtctacagggcttaatgtttgttcgttacgtgagttaatatacgtcatttaaaagagtgtgtaaacacctttttttaacttttttcattagtgtctagaaaggcacatcatagtcaaaaagtttacatccggaagacaggactgccggcggtggtgttttgcctccggataatagacagcctcctgcctggaagctacggcagttcgcacagctcatatcctgcaggtatataataagctgccggcgaacgtgccgcggtaaagctttagcctgggttgctacccgttcaaatagttctctgtcatcgagcgccatatccgtttccccagtcgtagttcatgatttgtgggtagggtcgtttaatccataccttgatacgcttaggaatggccagctctcccttacggcgaataaactcatcgcatgtttcaggcggttctgttcctgcagcattacgccaccaggcatctgccatttgtttagcattgccatgggcctctatatttacccatgttgtatacacttccaggtttgagtagtacacaacctttatactgtcaggtcgtccctgcttctggaataaagaatagtttacaagcgtaacatctttatccacaacacgaagctgaccgttagtcattacctcttcttctgatgaagtgaaggcaatagcaggtccgttaactgtaaactcaaattcatgtccgcacatcggatatacaccattctcgtctggtgtacttcctttagccggatgtttacatgtacgagcagcatagccacttacctggtgacagatagggcactctttaccaccaggcgttttatctgaccgtttctttttcttcttaccaagacgtggcggaacagccgggtcatcaataggaccaaggtcaatggtattagatgtaaagtccataacaaggcagtcatgcttgccaggcgctgtacgtaatcctcgaccaagtatctgcacccacaaagcaacagacgtggacgggcgcaatatgccgagcatatcaatctcaggatagtcaaatcctgtagtcaatacgtttacgtttacacagacccgtgctcgtccgcttgtaaactcttccagtgcggcttcacgttctttctttgtaagaccgccatgcacaactacagtctgccaacctcgcagattaaactcgtctgctatgttgtgggcgtgctcaacactcgtggcaaatacaagaacatgattcctgtccttaccgtagtgcatcatctcacgaatagccgcgactgttatactatgctggttggctaccttctcaagctctgacgggatatagtcacccatcctttcgccaacattactggtgtcaatcttggttaacactttcttgttgaccaggcgtgacaggaagccttcatttaccagtctggtaaatgcgtcaggtgttgtaaggtcatagcagatgtcggtaaatataccgcagtcaagtaaatgaccccctgccaggcgatacggagttgctgtaagtcctgttacttttaccttaggattaagctctttgaagtgagcaataaccttacggtatgttgtttcagacttctcaggaacaagatgggcttcgtcaatgaatataagattgaacttacctgcttcttccaggttcttaatgattgactgtactgacgctacaacgatacggcctgaaaagtctttgtgtcctgcacctgaagagtagattgatactggtgcttgtggccagtggcgaacaattgctttggcgtcttgttctaccagctccttgacgtgcgtcaatataagaatacgctgacggggatagctggtaagaatatccttcatcaacataccaagcacaggtgatttacctgaacctgtcggcatgacaataagtggattaccactataagaattgaagtacgaccaccaagctgtgaccgcttcttgttgataccagcgagcttcaaaagccatttatcatctcctcattaactttatatattataccacttccttgtgataaagtatacttttattttaaggagagtttaacgggcttctcatcctgcgggaagacatcagcggggcgataatcatcacaagctgctaattgctcttcgattgtttcgagctctttctggtgcttgttacaataccacactttgccctgaagcggtttactatagcggcaggttctgcagttcctgtcgggcattgctcctttgtggcacaagtggtggtactcgcacattcctggcttgcactcccaccaaataggcgattcagaaatcttcggcatatccaaaccagattccgcatatacgacagcctctgctttgctcagttgtatatcactttcaagtaagtcaatctcgaccacttcaaaatacatctcatcggtgttcttgttaattgcaatatacacagcttgattcagcttaagcttccgcatgtatacttgcatttgagcatagtgtaccggcttactggctttaacagacttgagcttgattagctctttaaacgacttatcaccatgcgttttgaattcagcaagtgcccatacgcctttgtatttgattacacagtcacaagacccagagaagatgtcattgaaatcgtgtatgcgccactgcttacctgttttaggattgacgtccagcacttcatcacacacggaacgaagccacttcacaattctgctttcttcaaggttaccacgttcaaacagacgaagttgcttcgcggtaaacttctccttgtatgaccagtgcagtacatgccaaagatagcgatagcagttatggcctatctgcgatgctccaagatgcccgcgtcgttcttctctttcgtgggcttctactatcttgacatcaatacgcttctgcaggtcgtcaaacggactgggcattattaaactcctcaatgctgaattcatcgtatacaatattatgcgcccacaaatgagcgacggcatttgccatgctgtccttccatttggattgagaagctgtgtgtgccaatgcaactacacgtaccaggttaaggttggctatcagcatatctgcacaatgttcgcacggcgggtaggttatgtagatggtaaccgggcctaatgaaggagtgtctaactcactccttatattagctaaggtatttatctcgctatgaatagttagagcgttcttaaggctattaggcactattcttatagagtctaactgcgtaggcagaccgttatatccagtggaaataatacgcttgttctggtccacaagaacgctaccgacttgacgtttcgggtccttcgaccagcttgcaacttcacaagctatgcgcataaaccgcctgtcccacttgtccatcttcttcttttgcatggtagtctccgtatacgaaaataggggccgaagcccctattgaatatctactcggcagggattattcttcccaaggagctgctgcaccgtcatcagcaccaggtgccgttgcagtagcactcgccttcgttgaagtacccacacctgcacctactttcttcgtcgtcgatgcagttgcttgagaatgaccgcctactgcagtagttgcttcagttgacgctttgtattcgcgaatatcgttttgtgggtcgtactcaccggtcttgtcgatacgaacaccaactttaccagctacaatacggttttccagtaagtcggtagaagtcagttcaacaatacccagcgcacgacacagcgcagacagtttgcgatgaccgatttcaacagcttgtgcattagggttggagtaggtaatcatgtcaaatacaacacggttagcgaactcaccttcctgcactttaagacgcagggacaggtaagaaccagtgcctgctttagtcggcttcagctcaacctcttcaatcatgaagttgtaccagcctttcgggatcgggtcaaaagactgttgcggttcgacggtagagctgttgaagtttaattcagccattgtttggtatcctgtttaagtttagtttaatttcgtttaacgctttaccggcagcgttcggccgtgatgcttattatacgccactttttatcatggcgtaaacacttttattcgctggtttctttctcagcttgagcggctttcttcgccatccaggcttggtgcttctctttcgattcgtccgaaccgattttagtgagctgcacgttcgggtcgtcgttctgcatctgttctgcagctcgacctgtcaggagcaggtagctgtctgactccggatgatagtaccacagctggtaaggatgatagccttgcagcttgtcataaatccagcccaggtctgcaggttcacgtgcatccagctcacgacctggtgcgttacggcacttagcttcccattggtagtcaggctgggtctggatgtagcgctcgctgttaccgttggcatcaggcgcagtcatacgtaaagcaagtaccgcatccatcaggtacggcaactgcttaggtagctgttggccaggcataagaggtgagtacagcattgcaccagtaacctcgtccttgttcttctcaagcttgcacaagtatgcaacgctgaaaggcaggtcacggaactgacgcatgatgtacatcatcttgtcgttggtgttaccatacgcctgtcgtttgtcattaacctgtgacttctcgtagtccagacaaacttcagccacatctgacagcgaatcgaaaatcagatgctcatacttctgcgcatccttactttcggtaagccatttgtacagcgccagaatgtcgttgaacgtattgattggtgtagagtcgatgtcagcgtctgcaatcgacatcaaaccaccttcagcgttaataaccagaaccttgtcgtgaggcaaggtcttagccaggctggttttaccaacacctgatgcgccgtaaatagcgaccttaggtcgcttattttctacggcttgtttagtagatacaatctgaaccattaatgatagtcctcgtaaagtgattcttcatcgcagtacatacgataaagagcttcttcggcttcttccagggtgtcaaactcctcgccacagacggagtattttgtgggttcatcgaatgactcgacgatatgccagtcatgatgaataccgtatgtccacaagtcgcagtcatcttttgcaacgagcttacgtgtggaacgaaattgtgctagagtattgatgctcatattctctctcctcatgtgtatagaggtattatacaccacttacatggggtaagtacactactattttacactaacagcttgacacgatagccgtgacaaaccgaggttggctataacgccatctagcaatactcctgcatgttcttcattgtatgcttctacccacaaagggatggtgacgcccttcagatggtcgctgtacacgttgaacctatatacctgtttgtgtgctttgtcaacacgtacaacagtaaggttgccatcctcgtaaggaggaagctcaacgcctttcttactccagaagttacggaactcagcactattaacaatgccatgtacaacacgttctgtaagctctgttttgaggtcagcacgtgcctttgtactgataaagaaacgacaagagaagaaagcattgacgtttaacacatcaaccgcgtacacaacgttatgctcttcagcagttggtgctttataaacaatatatttagttttgaacaggtccatagtactctccagggaggaagactggcgggcttgcacccgcctaagttattacagcagttctgctttcagcgcagcgataccatccagcaatgctttgatgtccgggttagatgccgctaggtcagcaacaactgactgacgacgacgttccagttctttctcaacttccagatcgaggcgtgctgacgcttcacgcagtaagtcttcaacctgctgacgacgctgatacttgttaaagtcaggtacatcaaccagccatttgagagttgcagtgttgtagccagaagtattggctgcacttacagacacaacatcaacaagcttggtaccgttcagctccggatagttaacattgcgaacatcaacaaccgctttgtcacctacacttactttgccgatgtacttgtaagtgtacacacgaccattcggttcaaacttaacaccaacaaacttcagtttgtcgtctgcaataacctcttcctcaactttgaagttgattgcagtattcttgacaggtgcagccgctttgagcttagcaaccatgtactgttctgaatgagacggacggcacagacggaagacgtcttcattgtacgtcagccagttaccagtctcatccacgcatgcaatctgattagtaccatccagtgaacgaacaccagggcgattcttctcaacacgatacagcttaccttctttcaggttagcgtaagaacggcgggcgataccccagttgtgtttttcagattcatacttagcgaaacggtcaacactgaagttctgcttcagaccacggtcgtcgattacccataagttatcgtaagccccgccgaaagaacccaggttggcatacactttgccctgcgtcaatagggaagtgtttccctcgtcaacacagataacaaaacccagagcttcgtgtgctttaccgctgcggtcaaatactgtagtcatttcttgtttccttgtataccagtttaattgtatgccagagttattccctgcgcatgtgctttattgcttaaccgttaaagacattatatcattagtgagtggtgacgtacacatttattttaaggcagaagtgcaaatagcatcacacaaacaataatgagcacggtcgtagtcttcaaacaagaacacttcgccattggcgacaacttcattactgttgacctgcaggctaatacctgaatgcagaagcacatccatggcctggtccttgttcttgtacgggtcccaaataagctggaagcctgacccacaaaggagacatcccttgagctccggaagagttgactccttcacagtcacattacaaatcttagccagtttagcacgagaatcgagagtactcatttacgtttacctttacgtttgtgtagcggagtatatgttttctttggtacgccaaacatggccgcatatgtaccgacttctttctttgttggcttatccacaatctcgtcaatcacgattaagtcatggttgatattgcgaaagacttcagccgctcttttctcagcaggagtaaagtcaataaccagctctttgcctatcaggctttctttgaacttgtcaaatagccatttgtcacgcggaccaggattgcccataaacataacacgcatctgcttattgtccatggatgatataccccgttatctgtgttgccagatacaaaccgtataccacacacccaactagtatggcatcaagaatcagatgagctatcttcacgtttgacctccggaaggaatgagttatcaaccttaatcagtacgttacggctgttaaccacttccaggctggtgacatcatttttgtgggttacacgaataaatgcaacaccctcagcctgtgcctgctcaatagctttattcagcacaacattatcctgtaccatatgacgtacgcgaggaaggatattgcaaagaggttccatctcatccattcctgcagtacgcataattgacttgagaatgccgaggtggtgacggtaacggtcttcaacattatacttcttgccgttatgttttagttctgatgccatgtaagtctccaaaagttaaggggcttgtgctaagccccgtttaattactcggcttcttccgtagccgccggggtgaatattacagtcggaataccaggtgaagtcttaacaacagggtcgacgatagccagttgttctggtgtcaggttacggtatgcagtaactgacatttcatatttggttttaaacagcttggcaacaacagtcttcggtaacttcttcattacgtcaggcacaagcttctggtcaagtgagcggttaaccttctgctcaaccttgagcttgccaggtacgccatgcatgctgaactcaaccgtttgtgtaccttctttaccgcggttgataatcatgtcgcgttcaagacgagccttaatggtccggcgcaatgtctcctggtcagctttcgcttgtgccatccagcggttcagattcgccagcttgtcgtacagctgttccgtgtccatcgattccagttcttgtggggtcagtgccatcagttgtttcctcaggttgcatgtgcatagttgcaccgatcagtaagcaatagttattgaacattgtacgtagcgcttggcccgcagcaatatccgttacgtctattataccacttttagtggtgacgcgtaaagctttttctttctttgttttttccacgaatgcaatgctgatgatttcttccgcatgaattacgtggatggtacctgcaaactcaccagtcttagctggtgcctggtacactaacgacatagacggttggttactcacttaattgctcctatttatataagtccatccagttacgatactcgtcataaaaccggtcaaactcgtttttggtgagtgcaatagcaacaccatttaccagatgcatggttcgtgttttgatgttgacatacatgacattgctgtacgggaataagctaccgtcattgtcagtgaaataagtaggcgtaatatgaagcgcatcacgcaatgcaaccagtgattcaacagcttcagcgtgccattcacgtctgaaggtcatgcaaggcggtgcgccgtcttcgtcctgggtaccacgcaaagtaaggtatacaatttcggcagtatcattgtgcacaattacgctaatgtcgacgatgtcgctggtacggaaggtaacaaagtgctcttcaattacttgttcgtcggtattagggctgacgccctgaaaggtcttgagtgtgtgaaacattggttgtatctccttagcagaatgtacgtctattatgtatataaaggaggggaaagtaaatagatataaatgtataaaatacataaaagtctatttactctggtttaataacgtgtatataatgagagccccacaaacaagaggagagactcaatgataaagccaaaactgttgcggcatattcgcaacggtattaagctactcgctgaaggcaatgagtatgcctgcaagcaacgcggtattacaaaagtcggcctgttcaataaagagttaccaactcgctactttaccaaatcaccactaacactcgtacctgcagcggagtattataaagaccccgaagcagcccgggctaaaatcaaggaaggtcttgaccgacttgtagaggaaggctatttgacagtacgtcaacacactgaatcatcttattactacaagccaacttctaaggtaaccagcaatgacaatgacgagtcagccgagtgatattctcggtctgaaatactttaagccagaagggattccccaagtcttcaaagatatgaagcgctgggctatatttgagctgacgtacgaagacgagactctcgaagttcaatccaaacctaagaaacctgcaagagcgccatcaggccgttccttcagcacaacagtgcctgaagagtggatgactttcgacgacgccctgtcacgttgtattcgcaatcgtgaaatgaagattaaagctgtgcaggggaatatcacctttgtaccggctttggttgttcctcgccagtggtactttgttgacctggacaaccatgaagataacccagacattgaagctacccacaaagcgataattgaagggactcgtggcgcttatgccgagacgtcaatctctggcaaaggtcaacacatcgcaatccctttaccctggactgcagcaacctctaaagagaaagacgaccagctggacatcaaaatccagaaggctgagatgttcctggtaatgacgggtaacgtgttgagtgagttcaatgctaatcctgtttcagcccgtgaatggcatgcagcaattgagaagttctttcttgaatcaagtgcacctgacattgatgttgagtttgagcaagacgaagaccgtggcgaagagtatgacaaagagctgtacgaacagttagccgacaatactcgctgggcgcttgaacattatctgaatgagcatgcgccagacggtgttggtgtgagtaatgacggttccgaacgtttaagccgcatactcaaagacttgcttcgtgtaacccgtaactatgaagttacacaacgcatcttcatggccagcaaagctgcagcatatgaaggccgcagaccaagccgacataacctgtctgttgacaagtaccatcagtggttcagtcgtgtaggtaagactgtgctgaaagaaatgcaacgtgacggcttattcgttaagaccaagtttgctcttgacatcaacaaagagttagccaagaattcaggtgtctccctggctgagaacgttgagttcaaggtcaacgacgatattctgccttctgatgtattcgtcagaacggcaccgtccgggtttaaacggcttattgctgagatacaggataacatatctcctgctaacagggttaacgactatgccatcggcacagctcttaacatcctgagcaactgcgctggtcgcaagtatgtttgcccagtaggcggtcatgctaacttcctggtaaccaacatcattcttgtgggtggttcatcaatcggtaaatccctgtataccgagttgttcccacaaatccaggcaagtgtaccagacacatcacctatcagccttaaccgtatcccaagggaacagacttttgcaaccaggacgtttgctgaactgatgtccaacccgtcgtaccattcagtccagttgttctaccctgaatttggtctggctttaggttcaggcttacgcatgaatcctaacaaccctgacaactttcagaaagctctgatggacgcttcaaccaagcgtaaggttggcggtatactgacaggtatcaaacgtgctaatgctgacaatgatgtcaagacggtaagcgaaccgtgttactctatcctgggtgactccactcaagagcttatacttgacaacacccggaagcaagacttctcaagtggctttttgccccgcttcctgttcatcccgaactatgaacgagcggagtttgccaaacctgagaaggtagggcgtcgccagcagattcgccgtactcaattctccaaagaactgattgagaagctggaagcaatcgcttatgtgaatgctataccgcctaacggtaaactaaggcacgacccgattcctatttacgatgagtcggacgatgatgacttcctgtacgagtaccagtgcaatattaatgacatgcgccagtattacagggacaacgaagtagcatctgcctttgtgggccgaatgggtgagtatgtattcaacatagcagcactgattgggttactcgacaactgggatgctcctgtaatgaccagggacaacattgaatgggcttacaaatacgttcttcgttgtataaccgcctgggtcaataacacaagcagaatagtcgcacctccgactaccaacgctgaagtggttgacggcttcctcaaagtctacagggacattttggccctttacaccaaaagaggatggtctggcatagtcaagcattatcctgaaggtgttgtaagaagcttacgggaagaccatctgaaaatgaacgggcttagcatatatgctatccggcaatcattaagttggttcaagtccaattatggctttaacataaccgctaataacaaggttattgacggtatgttgcaggatatgattgaccaggactatttagcagtccaaatatacaaacccacaagagggaaatcggcaaatatctactgtttaaccgaacggggatacgacgaagccaagaaacttaagtaaaatcaagggcttatgtagtaaaatacgtaagcccttattttatatactctttttgctccggtagactagttatggaataaataaaccgtgtttttcgaattaagtgcacttaagttactgttttatatactcttttctttttacatgaattagtaaatatatggagccctttataaagaaaaaggggggtaataaggggatccaagtaccggataaaagggggtatatatttatttattattattattattattatatattattaattatattagaagtaataaaaacagctacttagaggcgtctatatgtatgatccggtttatctctttattaatatcagaaccggatgaaaaaaatttacgctggcgaaaaataataaaaaaccggactgataaataattcgtaggcatgtctaaagccaggcgtggcaagcttcggtgatatttactatgttattgtatgttagtgtgcgttataatatatttattattcaacagatgagttgtacaactatggatccaattgtaaaagtatttgatggtaaaaatatcacattttcatcaattaatagaggaaccaaaatggttcccctcattgttgttaaaggaagcgatttagctaaagcgctaggctacagtcactcgaaaaaactttataaaaggttagacagcgattataaaattactgacgacaaaggaatggtatgggtaactgaaccaggtatttatcaggctatattcggttcacaacttgaatcagctaaagcatttcagcgctgggcatacgaagaagttttcccaaccattcgtgggaatggttattacgttgcaccagagcttcaaccagcgctggatctactgtctgatgaaatagacttactacgtgcatatgctacagctgactgccacggaagagcaaggcttaagtcaagaattatgacagtatggaaaaaacaagtagaaaatggtaactctttggaccgcgtagtccagattttaaaaggaaacagtgcatggtaaatattcgtgttattggtcagaactttgagagaaagatggctaaaaaatttaacgaatcttttggacttgactgccagcgtaacctacagcaatcaataaatggcggggatgacttgcttggtataccgtttttcagcgttgaactgaagaagcacaagaccaagtctatcggaacatggtggagacagtgtgcggcatcagcaaaggctcagaacaagatgccggtactgatatacgaactaccaagaaaacagcctaccgtggtgatgaataaggctgatgtgattgactgttttccaagtggcacgacttttaacgaggcatcgaaccgcctctttgtgggtctagtagaattaacatgggaacaattttgccgggtctacaactattacgttgcgcccggcactcaatatcacgtcaattaatcttgtttcaactcgtcgcaaatgacacgctgatttttggcagggataataccaagatttagcagggtgtatggactatcggcgacacattgctcaacggtagtccattcaggtttggattcaacaatttcgtaactacagtcatgagtagccacacatgttgccaggattaagccaatcacaagtaatctccatcaaccagaaactcaaacaattggttgtagacgttgcaacctttagcgaaagagctttcagcaggtttaccatcgcggacgatcatcatatactcaccgccatgaatatccacccagtattgcatgccacctttgaccgggttacgttgtaagaatttaaacattatttgctccttattccaagtttattcaataaccaaattgtcatgtcaacccaggttaacggtacagttttcgggggttgataattccagcagcttgcagttctttgtatttctgcttggcgccgctccgcttcgcgtaataccgcatcgtcagaagtgccggcagaaaaaagatcggtaacaccagataaatcgcgttgattaacacgtcgagcaatgtcatataaatcatccttagaaaacataagccaataccataagaattatcagaaagatcccaaccagcttcctcatagcccgaccttcagcatatgcaggattcacaacagaatactcaacaacatgtttacatcggaccataaggcctccgcttgtgggttaattcaatcatgaggacttttggcaaatcctcattgttgaatcactctatcattacctgaactactattatacactctttattgaagcgagtaaacacttttccaccattagtgcgtttagccccagattttagagctgactggcaccagatatgccactcctcaactgtcaagaatttttgctcagctttgggtggcaatccatgggcaaggtctaccgtagtaaatttgactagtggcattacttgacctcaaattttgactcgtcgtattccggatcagtcacgtcccgggtcgcacaatttttgattgcctcccagtaacgttgggcgtcatcaccatcgacgtaaaccgtccagtggccgtaaccaccttcaaatctgtcccaggcttgttcccagactttaccatcttccagcttgtaccaagttggacgactgtcaaactcgcggattggatggtaccccaacaagggattcatcaggtcaataatgtcttcccgactaatctcctggttctcccacaacaccgtcatgaattgctcaaacttgaaggcgtttggcagaactttgaggacttcaccatcacaatatacggtataggtgccatcttcgcattttgcactgtacatgtttctctctctcttgttgtgaataatttcaatcatgaactatcacaattttggatagttcattgttgaaactatgctaattttgttgcgatctgaattgtcagccggaaatcttccatcaagttatcaaactctttggaaccaccaacagcatcagatatttgatctttcacaatttgggcatttgattccagtaattcaatcaggtgcgccaattcgtcttcagtcaatttcagatctttcataatgcatccacccaagccataacttttgccagtcttacaacgtcttcatggtcccgctcgccatcagaaaattcgctggcgatgatacccataattgacgccagattcatgttgatgatgtaggcgtgttggcgcacttcatcaattcctgaatctatcaccagttccgcaaattcttgtgaaccttcatcccattcagcccaatactgctcagcataaaagtccagttcttttttcatctcaatgtcagtcattttgattactcctcagaacctgaaaatttgtcatcaatggactcaacaatatagtcaagagttgaagtgtgagaactatcagaaaaagtgcccatcttctccagctcaatcatcatatcccgtaaagccattgcctggtctttggtcagtttaattttaagcatgtttctctcctgttgattgtgaataatttcaattgatggcactacttgagtgccatctcaaaaattactcttcagtttcttgggtttcaggttttacttcagtttcaggttttttgccagttactgatttgccctcagtcactttaccagattttacatcattccggtagtatgacatatatgactggataactcttttggctttgatgtcatccgcctccatcccacaggctttcatggcatcaactagtgccaatttggagtcttccttatccatcaggttgtaatctttgaacaccagataacaagtatcttttgttgatggaccagatgaagatttccgggccccgccattggaagatcttgatgccacaactttgacctcttcaacttccagttggttcagttcatcaaacaatgccttcaccagcacttcttttgagtccttgacacttacagtactttcatcattaagggacttaatcatcttaatgatctggttgttggcaaagtactgaagactatccatctgcactacaatagtcccaagactttcagtagtcagaccagattttacagactcaacagaaaaagcggaagtcaggtaaacatagttgatagtagtcattgatgtatcctcattgatagaatttttgataagtgtcaatccttgacaagtaaatccaatcatgaggacttttaccaagtcctcattgttggaaattacttcaacttatccagaattgattggagtaacttgaccctcacttcctgatctttgacatcccttccactctccctgtcatattccaacaggtcactttccataaataaagtggtgtccaattggtcaaccaataattccagttcttcttgggacaattctaaaactttcatcttattactcctgatatttaacaacttgggactggataaaatccacacaatcttccacatccattgactcaaagtctggaactggaccattatttatattgacacaccaaagcccttcattggtatcataccaaagtgtgtagttgtccatcttaatagtcacctcttgtactagtttccagttgtgactactgtttccaatagtcactggttgaaactattactagtgttactatcaacaagaaacatgttaccaaattgttaaagagcaaaaggtaccattgacatctaccagatgtacctgttgactggttaagtactacctacccaaattaaaccataccaataccctccagaccagttgactggtcacacagtcatcacattcaataaatatataatagaccaatcccacttgattgtacaccttatatttgtaagtttatgcaagtttttagaaatgataatcacttgcgattgagagtggttctcatatacaattgatatagtttcacatgtaattactcacttcaaaatggtcggcaggggttataatcacataggggtgccacttaaaggagccggcgaaattatttataaaaatataatttcaatctgaattatagacgctttgtgttataacggccgaagtagttcacacggtaattgtatcaatcgcaatagttaccagagtaatcatttcgattgaaataggtgcggcggggggtaatttcgcaggggtgctacctgccaggagccagcggaattttttattttttctctattttctccttatcaggaccaatcatcatcagattgatacaacaggagctaaccttttgcttatcacaataataagcgaagcccctctaaaatttttttatatttttcaggaattgtgtagacactcactaaaaagtggtgtactttctctcctccacgcgctatcattaatatgaatcatcaaacggcctcacggtctcctacttgtgggtaacattatgaaaattgttcaattagagccatatccgcctcaattagctatcatttgcagcgaaaaagagcacgaagagctccaaaaactgatggatttgcctgattttggcaactggaatgaccgagaaacgcgtactgcatctacctttacattctctcgcgttaactatccgtacctgttaatcgtcgtcgagctgtaccacccggacgacctgaagtacaacaccatttcccacgaaggcattcacgtaatgtcatcgctgatgaactatgtagggcttaaatacgacccagaaaacgatgaatggtacgcatatcagcatgatttcgtcgtaaatgccatttgtaaggcccatgacgagtatatagagcgccaaaaagcgccaaaaactaagccaaaaatagaaactggtaaccatcctgtgatactaccacaagacgtaatgaactcgcttttgactgacactactggggactttttaggtgattaatcttatcttcgcaatgggccaaaatggggaattcgggttgtccccggagtttatgaagcatcaggttgactcgtgcaagactatggaagaggtccgtgcgcttcctaaatcgggtctgccttggaaatgtccgtcagacatgctctttttcaggactatgactaattcaattgcgacagaaccaggctacaatgcatatcagcaactacgtggacagttcccaaatgaccagttgcgaaacatgatagcagatgtaacggtaaaaatggtcgggcatagtgtattgttagccggtcgtaacacgtatatgactatgagtctgcctatgtcagcccacagaatactgctgccggtatctcgccagattatggcttcagaaggctacaataacctgggtgagatggcagcagaccttgagtccagaggtactgacgtctggattgtaggcggtgccgagttgatactttcggcccttgaagaacacgcaaaagacttactccgtatcgacaacatgtttatcagtacaatcaagcaatcaggtccaagtgatattttaatggatcgtagcaaattaatgatgtacattgatagcgacttcacttataatgatgaatatgttgataacaaacaagttctgatacaacggtacaggagtttacacaaatgaacatcataatcgagggtcccgataatgctggtaaaagtacatttattgagttccttaaatctcatactggccgcagtgttattcataatactgttgacaaagatcccaaatctgtcatggctaaacagaccaaagaaaacgcgttggaaggcgattgcatttatgaccgtagcgctgttatatctgagtatatctattgcctggttcttcaacgtacgcctgtcatcaatattaatgtatcacatgtagcagatatgtgtgacaacgccatcgttatcttttgtatgccgcctgttgaaaaggtactggcaactacaaaagacgagatgcctggcgttgtggaaaatcttgaggcattatacaaccagtatgacaacctcattgacgagctggttatgatgggcaagcagttcttcatttacgactggactgttgaagaagacggtcctgaagcagttctcgaatacatcaacgaacgtatcaataaggagtggaacaaatgagcccagtatacaatacctcagtcacgctgtcagcaaccgtaggagacgtcaacaagactgttactgtgggttcaactaacccgaacctgtcaggtgacgacctgttgcatctggctaagcgtgcgcttgaagataacgaagtgactggtactgaaggtgtcagcattgagattaacatcgatggttatgaagaaagcatcagcattactacttctgacgatgaaaccagtgaacagctaaagttcaacgacgagctggagtatcgtaccggtgagatgttcagcagtgcgctaaactggtacttgtgcaaggcttcaaactacgctggcgctcctatgtcagaccgtatgttagctgatatgtctgcacgtgaaattgctaaaggctgggcgcatgtacagatgctgcaagagcatatatgcaagctggaaagctgcaataaagacgcgtctgagcttattactgcctataagcgacagattaacgacctgcagcaactgatgggcaaacgcgctgaagaatatgaggctgagattcgcagtcttaacggcacagctgttgctaacaaccgtgctttcagcgaagagcgtaaagcgcttatcgcccagcgtgacgctgaaaaacgtcgtgcagacgacctggcagaccgtcttaactttatccgtaagcacatggatgctatggaagtggtaatctgatggacctgttcgatatggtcgaacatcctgaagtaaacggcttggcggaagctaagccgtttaactgggatgaattcgtagcaggcaaacctgctgtaacccacaacgggcagattgcatattacggaggccatagcgaacatccgatgtgcactcacctgtacaacgctataacaaccataaccgacgaaaacgttattaaatacggaaaagaagtaatgccttttcttgtagatgagcgcggttacttcgaaggtaaatggttcccgtttctggtagaaatggcctaaaaaccggataaatataaaggcgtctaagctagttcttcatctatataagctacttattcgcctttctactgtagactttcttatcacctctctagacactccatttttatattctgtttacttactccgcgtaactcgttataatccccgactatccggattaacgaggacgatacccatggcaaaaccgaaaaaaacccgtgaggcaacagaagagctgttggccacaatgcgacgtatccagctggacccgttggaagttatgcaacgggctatcatacttgctgagcgtgaagacgactacaaagcaatgatggatggtgcactgggcgttatgccgtacatgtatcctaagctgaaagaatccgttgtcaaagcagacatcgaccaaaacctgtccggcaatggcgtcaacctgaacattacaataggcgaccagaaagtggtagatactactggggaagagtaataaatgaatcttgactttcacctgcatgacagacaaggtgccgctctgcggtctcaggcaactgagattctgtacggaggtgccgctggtggtggtaagtctcaccttatgcgtgtaatgtcaattatcatgtgctgcatgatacctgacttgcagatttaccttttccgccgaaactataacgaccttacggctaaccacatggttggtcccacaagttatcctgccttgctggatggtatgtgcaaagctggcaagtgcaagattaactactcgagcaacactatcaaattctggaatggtgcgaacatcaagctctgtcacctccagtatgaaaaagatatttatacctaccagggtgctgagattcacgttctgctgatggatgagcttactcacttcacagaaacgatgtaccgcttcttgcgtaaccgtgtccgactcggtgctctcaaagtccctgagaactttttccggccactgccccttatcttttgtgggtcaaaccccggcggtgttggtcacaactgggttaagcgtactttcgtaactgctgctcctccgatgaaaatcgttaagcaggaaaaacgcgaaggtggtatggcgcgtcagtacataccagctaagatgactgataaccctacgttgatggaaaacgaccctgactacggcgaccgtcttgaaggtcttggtgacccggcacttgttgccgcgatgaaagaaggggactgggatattgttgcaggtggtgcactcgatgatgtgtggtcaaccaagtgcattctgcctcgtatgcgtattccgaaaggctggactatcgaacgttctctcgactggggttctactcacccgttctctgttggtatctgggctattgcaaatggcgcttcgcttacagacgacgaaggcaatgagtactttattccgcgtggttccattatacgtatagctgaatggtatgggtgctctgaaaaagaagctaacaggggtattaaactttctgctgccgaagttgctcaaggcgttatccgcttacaggaaaatctgcaagctggtggctggattcaaagcaacgttaatcctggtccggctgatagtcaaatttatgcgtgcaaggaaaaagacgttgagactatcgcgaagaaaatggaagacgaaggcgtaacctgggtcaaggccgacaagtcacaaggttcgagaataaatggcttagagctattccgtcagcttctgaaaaatgttaagatggacgaaacggaaaagccgggcatttatttcatggaaaactgtccagcagccataaacacgttgccggttctgccgcgtgacaagaacaacacggaagatgtcgacacgaactctgaagaccacgtatacgatgattgtcgttacatggtgttgcgtggcatcaaccgttatactaccaagctcaaaataaatatgggacggtaaaatgtcgataaccccaagcagcacgcctaatgtcggataccagcgtcctgagctgactaagaacgctggtaagtaccgaatgattaaggactgcatcgaggggcaggaagctgttaaagcacgcggtgatttttatctgcctcgtcctgaccctacgaactgcacagaagaaaacctgatgcggtacaattcgtacctgcgtcgcgctgtgttctataacgtactgcagcgaactctttcgggtatgactggcctggtattccagcagcaacctgagatgctgatgcctgatgatatggaagtgctgaaagtaaatatcgacggtgcaggtatcggtgctattcagcaaatgcgtaagtgctttaaatcagtgcttgcgtttggacgagcaggattgctgactgactttccaaaagcacgtatcggtgagtttggtgaatccattggttttacccgtaaagaactaatggatggagaagtgcagccgacagtaacgctgtacatgccatggcagattataaactggcgagaagagtatcgcaacggtaaagtgatgctcactcaagttgtcatttgcgagcaaataccgggggttactgatggctttcagcaagactacacacccgtgtggcgtcacctttacctggatgaagaaggcaattgcaaccagtctttgtgggtcaacaagggcgacaagaatgcacagaacgtctccggtggtgcgttgtatgtcacgcaagagaatgttgtcttacgcgattccaatggtttaccgctgaagtttattccgttccagtttatcggttctgaaacaaacagcgctgagattgaccctccgccgatgtacgacttagctgtgcttaatattgcacactaccgtaactctgctgactacgaagagtcatgcttcgtaacaggtcaacccacagtatgggcgtctggtcttactgaggcatgggttgaagatgttctgaagggtgaactgcgactcggttcgtttggtggtattccgctgccggctaacgccgctgtaggtattatccagaccaaccctaatacccagccgtttgaagcgatgaagcaaaaagaagcacagatgattgcaatcggtgctcgacttattcgtgagaacggtaaggtagaacgacgcgaagttgagattaagaatgaagctgcatctgaggcttcgcttatcgtaactgttgcgcagaacgttgaagctgcttatcggaaagcaatcgaatggtgtggcctgttctacggacaccctaaagaagaaattacgattaacctcagctacaacttcatctatagccagttgacttatcaagaacgtcagcagctggttaacgaatggattgctggtgctatcacgttcagtgagatgcgtagtaatctcaaacaggctggcattgctaaactcactgacgaagaagctaagaagctcattgatgaagagctggctgaacgtgatgcacgtgaggtagcaaaagaagcagaaaagaacgctcaagcagctaagaacagcgatgggcaggaaaataatccagaaaaaactgaataaagctatttactttcggtttacctggctatataatccttcatgtcaaccgcgcaacagccggccacgagagtctgcagggctcagtggatttcggatggctggctgcgcggtttgacccaaacctgttcagagcccacttgagtggattgagcccctctcatataggattgtaaaattatggcacttaaaacagttgtaactgaccttaccgaagttgatgaaggcttccgtggcctgtatatcaaagacgaagcatctggtgcattccgtttggacgttgaaccagacgaaaaaacgctgaaagaattagaagacctgcgcaaagaaaaacagcgtatggaacagcacaccaaaaagcttctcgaagaaaagaaaaaagaagccgaacgtgctcgcctggctgaagaagaacgcgcacgtcgtgagcgtgatgttgaatctcttgagcgctctatcaaagagaaacatcaggctgaactggaacagtatactaatcgtcaggcccagctgcaagctcagctggaagcgcaaatggttgataacctggcgctgaacctggctaaccaactctctgacaccccggcacttattatgccacacatcaaggcccgactgcgcgctcaggaaattgatggtaagtggcgtactactgtcgtggatgttatgggtaacccgactgctacaacgccagatgaactagtggaacatatgcgcgctgataagcagtttgcacctcttgtgcgtggaaccaaggctggcggtggcggtgccaacggcggcggagctaatcctggtgggaacggcggtggcgaacagcacactttcggaggcggggacgaccgcatagcacgtgctcgtgctaaaatccaaaacacacaatggggcaaataatttatgtcactgtatatttttaacgaacaagtacgttctaccgccaccgaactggttgaccaggacgtacagaagtttaacgaagcttctgcaggtacccttattctgggtaaccagtacgtaatcggtgattacgttgagcaggcgatgtggcagctggttgacggtatcgctacccgccgtaatgcttacgctggtaccaacaaagttgatgcgcagactctgggccagattctggaccgttctgttaagatcgacggccgtgttggtcctctgaacattaccggtactatgatgcgtcgcatcggtgcaggtgatactgaaccagcagctgttgttgctgcacaggcttctgctgcgatgttccaggactacctgaacaccactgctgcatgtctggtagctgctatcggcgcaaacgctgatgttgttctggacgtaacttcaggctctggtgctgctgcaaacatcaccatgcagaacctgaacaaagtcaacgcgaagatgggtgaccgttctcagcagattcgtgcgtacatcatgcactctactgcgttccactccctcatcgaccaggctatcaacaacacagaacacctgttccagattggtgacctgaacgtgtacaaagacttcctgggtcgtcgttatgtcgtttccgacatcccggctctggttgatggcgccggtgcttccgctaagtaccgcactctgggtctgaccccgtctgctgcaatcgttcaggtcggcggcctgtacgacatggttacctccgagcaaaccggtggtgaaaacatcctgcgtcagatgcagggtgaatacgacttcaacgtgtcgctgaaaggctacagctgggtcggtcacaaagctggtcagtctccgactgatgaagacctggctgctcaggcgtcctggtctaaagttgcgacttccaacaaagacaccgctggtgttatgttgctggctaagtctgcaatctaacccacaaacgggactaacaaacggcgagctgactagctcgccttttttatttacacgtataaagttctggtatataatcggactaaacttgctggaggctttctatggcatacacacttgttgtggaagacggttcaattgttccgggtgctaactcgtatgttagtgctgcagaagtggatgagtttatcactaacgaaggtattctcattcaaccaggaactgacccgtactaccaggctgccaaagcagctattcgactggataaccaatttaactggttaggtcgtaaggtcagcaaagcgcagaacatggcttggccacgtactggcctcggtgcatgcaatgttgacatcgcggagtctgtaattccgcgagaagttaagctggcacagctttatatgatggccagtgtattgagctatgacggcgaagaaggtgtgcgtagcgaccaggctttgcgccgtaagaaagttggtaacctggagattgaatacttcgactccaaatcaggcgttaccggcgcaactgacctttggacgtcagacgtcaaggccatgctcaagcaccttgtgggtgcatccctgagaacgcggagagtataatgattcgcattcgccttgaacgtcgcgacaaacaaaagttcgagttcacctaccgtgcctttaagtcgtttgaaggtcaaggcgtatcagtaggtgttcatccagagcacaacagacgtataaatcccagggaccgtataacaaacgcagagctagcaatggtgcatgaatacggtctcaacggtctgccagaacgaagctttcttcgtagtgctgttggtggcaggggtaaaggccgacaggcaataaacaaagttttccgcgataatgtacctgctgttcttagaggaagcatgactgcgcatgagcttaatgacaaaataggtcgtatgcttgttgatgctgttcacgacagaatggacagtgacgtgccgcctcctaacaccgagctgacagaagaacgcaaacgcgggccaggtacacttagagaatctatgcagttgtacgattcgatagggtacaaagttggcagaaactggaggctataatgctcaagataacttcgctaatgaaggataagtcctttgtggcattaacagatgttcttctccgaaatgattcgcgcttaccaaacggtgacttcgaagacgaatatacagctgcaaagtatctgtgtaacattcaacctggtgcagctaccaaccagcctaacctgttgactaaagacgatggtgagcatgagttcccacgtattgcgatatactgtggacaagaactgaagctcggagacttcgttatatacgaagaccagccataccgtgtattccgtatcgacccatggagtcgtcatggccactactacgttacagcaattctccataaaggacctcagggagctcgttcagaagcttttaacattacctgacggttcatgtattattggtgaagagtctggtacagttgatggtacaccgtatgtttatctgcgccctggcgacgcatatgacttcggacctcctagaaccagacaaggctctgacggctttgagtacgtcagcaagccaatgatgactgctgtacgcattacagctgtcggtaagaatgctgctgagctaatgcgtaagctacacatagcactgggtagttcaccagctaagcagtttaaccgtttacgacattatgcaataaccaaaatatcgaagattgataatgtcggtggtgctatcggtgcaggctatgctcagaagtcaatgatgactgttgacattagctatgtacataaagttaagattgagcaaccgtacatctacaaggttgacatcacttgtatggatgataacggtaacaaagcgactggtacagtagaggaaccgtaatggtaactggagtagacccggaactgcaagcgcagctggataagctaacaactgctgtccagctcattcatgacttcggtatgtcagacaacccaaacatccctaacccggaaggtggtgtcatacgcacactcgaaggcattaacgctgcaatcaatgaagctataccaaactttgaaaatgctaacgaagctgctatccaggcgcgcgctgctcgtgatgcagctattgcagccaaagaagctgcagaagccgcagctgaacaggctacagtatcttcgacgtcagcaatctatgagtatggcaatgttgcaagtgcagctaccgtaactatacctgctgcatctaaaacaattgtcagtcttactcttaaccagccaaacaccgtaattaatatcggtggtgtgtctgacccgtctactgttgcgcgtcagattactattgctattaagcaaggtactggttctaacaaggtgaccgcttgggatcccagaataaaatgggcaaacaacagaaagcccgttctgtcattccttgtgggttacacagatgttgttacgttgcttacctttgactcaggagcaacttggatgggtttctttaacggtggatggattaaataatgcacacgatgttgcttaaagacggatcagaccatcgagctaatgtcgaaagccttatcgaaggtcaccaccactttcttgagcgcaatactggtagaactgacgacgctacgcgtcagcactatatcttcaacccagaaggagtagtgtcgaacaaccgccattttattgcgcacactatgatggagtaccaacctaacggtgatgctccgtctgaaagtcagtcgctgctgatactcggcgaaattcacgcgtaccttgctactaaggaacagcggtatctggacaaagcaattgagtacttcaatgcttacgtcaaatactattacgagggtgacccaatccctgatactcctcgtcgctggatcgctaactggctttgtaatggcaaagagcctgtgctagccagcttcccgatcaaccctgattcaccaacacagggcggctataaaaatgtgcctgttaaatttgttaacggcaaagcacaaatccctcatggttctcctttctggggcgagtacctggatgttgctacttgggcccacaggggacacatggcttggcctgctattaatggtggtgtccgtgttattaaaaataaagttgactgggacgatatttacaacaattatcgcatcactaccatgccagctgacccgtggaatcagttagcctggattgactggccgaggtatctgggtgaaccaagctacactgtggactggtcagctgctgaacctcctgtacatctcatcgagtatattgttgcatggaccaataacaagattggtgttctgcctggcaaaaacgatgagctatggggaggcgagattcttgagactggactgcctgactctcgtagaggtgagattcaactccgtgaccacactgttaacggtgtgtatctgcttaactatgccgttaagcttcctgttgaacacggtggttatttgcttaagcgaaatgaagtatggcacaacagaccggtaaacgttccattgtacggtgagcttcaacgcggtaatgctgctgatgctgagttgtggttctgtgactgctgctatatgctgtggcgaattactaacgagcaaaagtattacaacgcttggcgagctgtcctgtttacactggaggagtatattgatattgataaacaagaccagttcttcagacaagaccctcacgcgtcgtctccgtttactgatggcatctcttatgattggacttatcctgaactggcacaagctatatattcacgtgatgaaaatggttatatagttctacgtcagaaccaaaaagctcaatcatctctggagcaacaggctgtatggtttaagtgtaagccaacagctaagatacgtaccgaggttggtggtaaagatgacgctggtcagaatataagtgtcaaggtggaaatgtacatgaaccgtgaaaaggttgacgtcgagcaaaacgtctatcgttttgtcacacagctacctgctcttggtgcttctcctgctaactacgacattccgttaagcgattttgtcgcaggtactaagccagacggttctgagtatatcttagctgatattcgttcatccactgattatggtaatgccactattgcagtgtcttatcgtactgacatactcgacaacagacgtggcaacactgttcgtatgactatacctgatagttcgtcaggtgccattataggcttttggttactggaatcttcccaggcacctttaaactcgctgacgtatacttctacaggtccgttgtacatcaaagtaactgacgcgcaaggctggagctgggtacgtgatttacctgccgcatcaggctgggtaactcagcagattcgtacatgggagttcagactggcgtcataccaggaaaacccaggtacaccacctaccagcccacaattcggcgagattaagcagttctcgtttgtactgcctgacggcgttaatacgtcgacaagtattagctggtactgtgtgaatgatgttccgcctcgctataactggccgattggttacactattaagtaccgtcttactttctcggctgataacccgtacacagctaagctaggtgactgtactgtgctggactatgagaacgataaccttgcatatacgcctggtgttattccgttctccaacatttataaccctgattctcagcagtttgacggttggcacggtctaccttaccctgggtatcagtatccgtttgtctttacgcatgacgatactgcagcaggtacaaccagactgaacaacatggttaactttttgtacgattctcagcaatggtactttaagaagtttggtcagctaggtcctggcgcatctgcttttatctggaaccgttgggataactttaaatacggtgtacctgatacgtttaccatgtatcactggggtaatggtagtgcatggtcaggttaccagcctcgtgcttatttctccgca

SEQ ID NO: 4 - DNA, 53143 bp, unidentified
  source 1..53143: mol_type = genomic DNA; note = Found in a bacteriophage isolated from wastewater
aattaaggatgtaaccggtctacggtctatggatttcttggatgatattcagcttccacaggtagtgtctactgcgcttgaaggaacaagggactttgctgttaacaagctagcatcctttatagactggggcggtttagacgctaccatttcacgctctttagttccatggcttcctgactttagtatagctgaacagcttaagtcttcggacaatatgaggattgaacaggtataccgtaccttgctggatttacagaaaaacgttatctactgtgacgttgacactggtatcttcaagtatacgaatatgcttttgaagtctgttcgtgttgtacaggagaaagacggttcagctacgtttacccttacgttccgtgaagtcatcgaagtgccgattgtagttacaaacgctgtagccgctaagtcgacaggtcgccctgctaataacggcactaagaaaagcggacgtgcacaaggacagggcgatgccaccagtaagaaggacataaacacaactacaccgattagcgagaaacgtgtaaacgataaccgcggttttggtgtaacactcggtgacatgtttggctttaacttacgaggcatattctgatgatatttaccacaactgctttccttgacattataggtaatgatggttctggtatttacgacttggaacctacctccgaaggtaagcaatcaatatcaatttctatcgctggatatacgtataacattgagttgtactataacacggtaggtcagctctggcaggctacagtgactgacatatcaagtaatgctgtactttgttccagttatgctttacaatatgggcgtattgcttttggtaactgggacacgcgtatagcgttgctggtaagtgacaaatcctccagccgcatcggtcctatgactacagatgacatgggaggacgttgcagtgtctacatcgtcgacaaaacagcctacccgtcagtttggccgcgcgttaaagcttgaggtcagcaacggtaaagatgaaggcataatcatctcaaatcttcgtgttacctttgacattcaaaagggtaacacgaagcatccgaataaagcgacaatcacagtgtttaacttgactgaatccaaccgttataagttggcgtcaggtacctgggattacgtccgtctctctgtgggttacggtcttgacaacatagtttatcgtttgatattcgaaggcgatattactcgtgctaacgaccaacgaaacggccttgacattcagactgttctcgaatgtggcgatgcccgtaaatcttacaacgatggctttgttaatacgacgctggctgctggttctacgtatgacagtgttgttgacgtttgcctggctagcatgccaaacgttgaagaagggtacgtctgccttaacagcaacaaaccagctttcctgagagcacgtactctgttcggacaaacgcacagcatactcgaccaggttgctgctgccaacaaggctacctggtctatacaagacaataaactcaatattattcctaacgactctgttactgactacgacgttgttgtgctgtcagaatcgtctggtatgattggtgctcctcgcggcacagacaaaggtcttgaggttacttgcaacctgaatccttctctggccatcggtggtcttgtacaagtaaattctatgtttacacagtacaacggacagtataaaatcgacactataagatttcggggtgataataaaccgaaaggaccgtggcgtgctgacttgacggttctcggtggacaatttgcgaagaaagttcgtcgactcaagaagccacgcaaactgtcgaagattgagtacgactatgttactgaacccggtgttgaccatacagtaggcggaggtagctgatgtcagctattgactataatacagcaacacttgatgaggccattgaggctgcactgtttgctgcaatgattggtaagcgccactgtttacctggccgcatagtatcgtttaacagcaacctacagactgttgttgttgaacctatggttagtgccgaaaacgaagatggttcaatgagaccactaccaccagcagctgatgttcctttattccagctaggcggtggtgattttgttataacgcttgaaccaaagaaaggcgacccgtgcttacttcttgttgccgacagatgtattgacgtatggtatgaactggctgaaaacgctataccaggtgacttccgacagaatgacctgtcagactgcttctgtcttgtgggcttcagacctaagcctctgaagataacaaactggatggaaggtgtaactatccgtaaggttgacggaagtcactatatcaatattaataatgctggcaaggtatcgataaaggctacagtagtggacttgcttgatacaccaacacttaatgcaccaaacacagaagccaagtttaaagaagttgacattggcggtgttaagttgtccaaacacagacaccaagaaaacggtgacggtggcggtattactaatggcccgcaaaactaggtaacccacaatgcgaactagacgactcgattcaaactgggactggaattttgggcgtggccgacttgactacgccgatacgtctgagtccattgaacaacgcatcgtgcagatactccgctgttatgctatggactgggtacatgacctggactatggcattgactggttcggactaatggagaagcctgttcgatgggctgacctggaggctgcaatcaagacagcaatacttgcggagtatggagttagttctatcgagagctttaccctaagcttcgaccctgactcacgtcacgctgtttattcggttgaggttaatgatatttaccacaacacaacctctattaacagaagtattaatttaaccggagaaaactgatgggctctgtaactagcacaggctatgttcccgtcaagctcgacgactggatcagcagattcgaaacgctcttccgtcgtgtgtacggcgcggatattgatttgtcagctaagtctgctgacggacaaatggttggtattctggcgcagatgtttgcagaccaggacgagcaagttgcaattctgttttctatgcttgaccctaaccaggcatctggtgtatacgtagaccagttccttgcctacgtagcgcttcagcgtaaaggcgagatgtcaacgctgttgaccagggttaagattgaaggtgaccgtaacactattatacgtactccttactatgtaactgacagctcgaataacgtgtaccagcttaactccactgttgcgctggatgataacggtgtagtcgaaacaagctttagttctgttaagactggtcgctttgtcgtacttgcaaacgatgagcttaaaccacagaccatcgtttctggtgtgcgtaaagttaccaacatgcaagtgtcgtctggcggtgcgtccactgagctcgactctgaggcaatagaccgtgcgtatagctcttacggcaaacctggcacgaacagcttagacggtattgttgctgagattcgtcagatgactgatgttatcgcgtgtaacggttacgagaacgaagaagatactcgggacccattaactggcttacctcctcacagtatacagattgttgtggatggtggttcgcctgcggctattgctgactgtatcttccgtcgtaagactaatggctgtaagcagattggcactgtgtcttatcagattacggataagtcaggtacacagcgcacaatgaaatggagtcagcctacttatgttgaggcttatgcttcacttgttgtagcccgtaaggaactgtttaccgacgtttccgaggaacttattaagaatgctattctgtccaaggtatacaatatcggtgaagaggtatcaacctatgaactgggccagctgattcaagaagcgaatggcgtaagccctaacttctacatcaagactttctttgtgggtaaatcagctaatccgtcgacagatacgattctgcgtatcactgctcttgagcgtgcaatattcactgcagaccgtatcactattgcagtggtgaatgctgatggctgaatatcataaactacttattcaacagtacgctgataagccaaaagctgttgcaactattaagggcttcgatgatgcaattcagggtatctgggacggagcccaacaagttgttgatagccttaatatcgataaagcttttggtaaaggtcttgataatgttgcagcccgcgttggtgcatctcgtgttcttaaaaaaggcgtagaccgtaagttcttcggctttaccaacaaagtaccagacgtgcttggtttcggcggttcgtctggtaataaaggtggcccgttctatcgctacggtgcatcagtatgggacccggtaattcttgacgacattgacctgcgtacttacatcaagatgaaaatctggaagaacatgcaagacggtactatgccgtatctaattgacttcctgattgaattcttcggaatgaataacttcgttataactgacaacgaagatatgacaatgactctggagatatacagtactctgacaccacttaagcaagtgctgattcagaactacgatatacttccgcgccccacaggggtgaagattgaacttaacacgagcgttgacgtcacggatagtctgtaccgttacgctactgtaaacttaccagcacaggtgaatgtatatggctgatgtacaaacaagacccgataacgacatcttcgccagctccgcgggtactggtgaactgctgccgttcggtgaccttgctcgtggctggggtgcaacccttggctactctgaaggtattcctccgatggagtggtttaactttatcggtaaccgtactgacaaaggtatccactacatccttcagcagggtgttgatatatgggtagaaactgagacctacccggttggtgcactggttaaagttaacgccgacaatatgctgtaccgttgtctggtgcagaacattaatatgccaccgtctgctaaccctacgcagtggcgccctgtactcgacctgactgcggcaactgcggcagcacgacaggttggtaaggcctctggtaacgtaatccaggtcggtgcatttgggttaggtggcaacgctgaggtagttactaatgctaacagcattgtaaacgacggtatctaccagcttccagcgtcaggtacgggcggacctactaacggcgttgagactgagattctgcatatcaactgggatgagaaaaacgcttcacagtggggacgcaccaagggtaagcgcgtaatagccatgcgtgagaaggttaacaatacctggggcggatggtcatactcttacgggcctgataataaacctacggcgtctgagctgggcattaaccaggacttcatccctatggatggttctgactcaatccgcggcaacttaggtactgtaggctggttacatattgcacgtactacttccgacttgctacgtgctgctaactccgccggtgtaggtactgttgagtattctggtaacatcgcaggcggtactgctgttcaggagttgctgacttcagtttctgtcgcggctaacagtaatgttgtcactgctgctcgctggggatctgtgcctatgtcgcacatccagcacatccttgtggctggtggtgctacacagattaacatggcagtatgtcgccctggtggtattgccgaccgccgtacagtagctttgcaggtggatggtcttaataaccgagtaactaccacaaatagctttattttatgcgagaatggtgttagagtatattcacctaacaacccgcagcctatcgatacttcagccggtaacgttcggggtattcgactcggcgctcgtattgctgctggtgtatccgagtcaacgttctaccctgggcatgtaatgactggctggcgcttcggcaataagaaagagctgcgcggtggttcatactggtcagcgccgttacagtattacatcaacggcacttggattaatgtaagcaacgtatcgtaaaggtttattatgactaagcataaggtgttccgtaactttactatgtaccatcctgaggtaacagaagagaacgagaacattgtaaatgctggtgcaatcttcctcaaggacgaggaaggtcgcgactggtacaatctcgcaaaagagttcgctgtcaaatacgaaggcgcaacgttcttgcaggtagataagaacggagttgtaattgctgctcataccgacccaactatgttccatcctgtgggttgcgatatggttgtaacgtacgacccgcccttcaacatcttcgagacggttggcgaatggctgtttgacggtaaagagtttacgcttaacgcaccaatgatgaaggagattgctcgtgagcgtaaagaacaagctctgtccatcgcttcgaccaaggtcagtgttttacgcgacacagttgatagtggcaatgctaccgatgaagaaaaagagctatttgctaaatggcgtgattacaggattgctgtcaatcgtcttgacattaaccttggttccgctatggttgttccacctatgccggagtaaaccatgcaactgtcatttttcaactttacagaatacaacccacaaaggacagcggagacacttccgctgattaagcaaggcgttgtattcatcaaggataacaatggtaatgactggcgcaagctggctaaagagctggctaagaataaagagctggttcattacattgttgtggacaagtacaatgctgttgccgcgtatgctaacgatcctacgctactgtttcctgttaattgcgatttgcatattgttgagtctgtccctgttgctaagtttgcggattgctattacgaatggtcgtacgttaatggcaagtttgttaagcactctgaactgcagaaggtgattgcagaagaacgcctgcaggaagaacaggcttgggttgaaggacaactcgacactgaagaagatgaggaacgtattatcgctctccataaattccgtgccgatttgttgctgcttgttatgtcagatgcgccgcatatcgactggcctatacgaccgtaactaattgctaccagcaagcttgtgcagttgctggtagtgtttcttttacgcttgagtcgtgctataatccactctgggtatacaataaaccggagatatgggatgtttgactacaacgacaagtcttcccttattggtcagtttgtggcttgggtaacaataacagtaagtactttatcactaagtgattggggtactcttatcggtatactcagttccttggtgatgctgattgttgttacgtataaccaaacacggcgaaccaaaattatgtcggattattacaatcgtaagaagccgatagaggatgaagtcgcatcgaaagaagaggtgttgcgtgagtctgaaatcagcagcgactaaaggaggttgcagcgtgctggctatcatcgggcttgtattgtcgatgacgagtacacatgtccgtactaataaagaaggtcttgaaataatcggtaatgcagaaggttgtatgcgcaacccgtatgtatgtcctactggttacttaacagttggcattggtagccgcatctacagcgatgagcccgctgtacggcgcgaaggcctgacagaccaggagattgctgaccgctgggtcaagaatattcaagaggccgaaaagtgtgttaacgactggtttcacggtaaagacatgaacaccaaccagttcagcgccatgacctctatggtatttaaccatggttgcactagactccgtaagaacaaggatggttcacctaccaaaatatatactgctgctcgtaaacaaaactggactgaaatgtgtaaccgcataacggactgggatatgggtggtaagtacaggggcttgacaatacgtaagcaaaaggaaaaagcgctatgtctaaaaccggtgcaataattgcagttattctcggcctcgccattgtgttcctgtctttgtgggtacgtgagctgaaaggcgatattaccgaccgcgacggtataatcaaacagcttaacaagactaatggcgagttgtctgctgctaatcaaacgctgattaattctgtaaaggatgaacgtgaggcctcagccaaacgcgccagtaagatagctgaacttgaacaacaactgcgtgataagaagggtaaatatgacgaagcgacaaaatatgattcgtgcgctaataccgttgctccttctgccgttcttgacctcatgcgctgataaacctgaagttgtttatgttgacaggatagtcaaggtttatccgcctggtgcctacttggttaaatgccataagcctgaattaaccggtaacacctggaaagcaataggtcagttagctattgaacgcggaacagctcttgatgattgtgcagacaagatggacagcataattaactggagtaacaaaggggccgagtgaaggcccctttatttattagcgttttcctttcagctcgttatactgcgcacatgcagcacacagcactgtaccgggtaaaagctgacgtcgtttttcttcaatgtcttccccacactggtagcacgtcagcgggcttactccggtgtatcttactcggttcgatagtgctgcgtcccgggcaacttgttcagcttcagaagccatatcagtaatgtccgatgtgcgcatagactcaatcattattttccctcttcttcacaatacagggtttctaattcatcgcatagctgttgcgtccagtaatcatcctcgccacgtatctggaagcacagcacaggaatatcctgtcgtaaaatatcgctcttgtaaatctttttggcaacagcttctggttcttcctggaatatcctcataaaccagtccaggcctgacgtgcagcctgaggcgtctagtatctccttcgcccttaacttaagcgtttcatctaccttatactctaaacctatattagacatatcatagacctttaattagtgcgcctctgcccagttactttctatcttagcatcagtaagaacaggtacacgaagcggtagcacagtttccatgacccgtacgaaatcatagaatccatcttctgcttgcttaccagctggtagagagaagttaagctcatcgtgtactgtcaggcgaggtacgccaatcacgtcgaagtaaccgtcttcataccctttcagcattgcagacttcatctggtctgctgacgacccttgcagcactcggttgattgccttgtgggtgtctgccagtttaatgttcgggccgtattcttgtcgtgcttcttcaaatggtaaaggcatcttaccgaatccgccacgttttgggacccatttgttgaaccacgtcttccggcccataaaggtttctacatacccctggctataacataagtcttcataatgcttcatggtagcaccaatgaatggtgcaccctgatgatacgccttcagaacaggttccgcttcttcaggcgtcatcgctaacttacgggcaagagcattaagcatcatgccatacaacaaaccaaagttaatggtcttagccggtttacgctctataacgtgacctgaggcttccttgataatatcgaccataacattgtggtaatctgcttccgggttagccgcgaaaattgctcgtaactcatcagcgcccgggccgactgcaaaatgcgccatgaatcgatattcaatttgggcgtagtctgctgatccccatcggtgtccgacatccggtacgaaacaagcacgaaggagtggtcccaatattttgtgtcgagacggtatattctgcagattagggtcagatgagctaaaccgaccactaacggttccaccgtcatcaccgcgcatttgatggaattgaccgtgaaggaagccatttgtattcatccccaatatatagccacgaataaacgtggactggattttttcataagacttaatctcagacaccagttccgcaaacggatggtgcaagcctgctaagaagtccgctgtaaacgacggattacccgccgctgttttgaagtactccagacctaaatggtcaaatgcaagtgctaaatcaggaccggagttaacgttaatgttaaagccaatctggtctttaatctgctggtgcattttccttatttcagcgctaagcgtatcatccgcctctttggctttgtcaaggtcaacacgcacacctgcaaaacgcatcttaagcattaatggaatgagcttgcactccatatagaatacgtctgttaaacaccagcgacttaacaaaggccactgggctttgataacgtgtattggtaagtcggcgtcagattcagcatagtaacccacaagacgaggaggcgttttgtagatgtactttctggcttcacctgttggcttacaaccataagcatctgaaatccattggtacatctcagctgagtctttaccttcgcctacatactttcgtccaagtccttcaagtgcaacacgcgcgcctgggtcgagtaatgcttccgcgaattgtacatccatgcacaatcctttgacttccacgccttctgctgcaagccagcccaagtcatatgtgatgttagcaccgactttaacttggttaggtcgcgagagttcgagccgaagccaaccaagtacttcctcagctggaaggttatcctcttcgccgagctcgtgtctgattgggtagtaagccttgaagccattgtccgtagcgatactaactccaacgatatgaccttccctcctggcccaaccactaccatttgcatccatccctgggtcatatgtttcacagtcaagaccgataatcttcgcagaagacaaatccgggtaatgcgcgcgcggccgccatccagtatccctgacgtatggtataggacggttgataggtttaacattctttgcaccttcaaagctatcgaataaaaagctcatcagtcccctctcacatacgcaattacaactgtacgagttgagttttccattttgagcgcctgactaccaagccctattctttccatgcctttagccagtttactcatctgactaataacacagttgaacggtttactaaacttagtcgactggaacttaatgtcgacggacatcttaggaataatcttgtctggtaagtctgcttttgctgttgactcgccagttatctccagaatggcttgaccttcgtcatacccagtaagctggtccataacttccaggaattcaggagtgatggcctgcatatccatttccatattgaagaacttcgatacgtctggccatttggctgcgagtaccggagcatccatctgtacgccatccgcaaagccaaagaacatctgaccgcgggcatatcctacgcttgtgggttccatcttcagcttaaccaaggcctcaagcattggcttggctatggcacattcaaattcaaaatctacgttcaacttctcgcgtatcatatacttgccgttagtggcgtaagcataaccatcgcgcaaaagtaaagatgttgcccatacctgcggtgcttcgttaggtacccatttggccagggcagttagcaccgggagtaattcgccatgcgctgaataccagttgttaactgtagcaagcggcggtattggttcattaagcgcttgcattcttgttttaagtacgcctgctgtgaccgtgaggtttccagcggctgtaatgttaaaagtaatctgttcagttcttgccgcattaacggccttacgaaatgattcagcatccacttgcaggtctgggaatcctttacatggcgctcgtagtaatacgttcttgtagtatgaatggattgtttcgtttgcaatccatattttgcccataagaccgctatcagtatacttgatgggacgagcttgttgaacggcaatctgtatttgtttggtgtcatagttaaacttgctcatagtataacggggccgaagccccgctccatcttatacggccatttggagtttgatgtttggcattggtttgtacttctcaaccattggcgcaacatcggcaggagtgaagtcaaatactgacacgtcgtaaatcgcgttaatgtcaggacgaccttcaaagttagtgtccagtgtagtatcagaattgcttacgatacgttgcaggaaaatctttgccgcatcgatatgattctgatagatgtgatagtcacccagcgtaacagtcatatcacctaccccagtacccagctcagcagcaatggtaatctgcaacatctgatgaagcaggatgtcatgtggcagaccaaggataacgtccgcactacgcatatggaacatcagctctaattcattacggttgttaatgaacagctgaaaaccatggtaacaaggcggaagggccatagcatccatctcttgtgggttccatgccgtaatgtacgcccggcggtcagtaggcttaaccttcagcgtttcaataacgtctttaagctggttagtaagaacaccattcttatagaaaggcttaatccattgcacgccgtacacaggacctaagtcacggttgtctggtgtaccccaacgtttgtttgcgtcctgcaggttaccttcccaccagttgcagccaaagcctttgagcgtgtcgacgtttgaaatgccgttgataaagcagtaaagctcagcagcaacagctttgatgttaacaggtttaaacaccggcaccatcagtttgttgtcgttgaaagccagtttaaacgccgtaccaaaacaacggcgggtaccaacacctgtacggtctacaacatcctcgcctttacgcaagataaaagaaatgatgtcgctgtaaagagaatctacagtgctgtatgttttcattaaaacagttccttttgagccgggttaacgtgtgcgtcgataatggcctggatgtcaggtgctttccatccttcaggcttaacaatatcctgactagacttatgcttgctgttgcttgcatcaggcttagcgcgttctttcgccatgttagcagcctgtaccgcatcccatgctgcgtcaagtggccagttgttgtttgcacaccaggtaatcaggtggataattaactgggccagacggtcgcaatgagtgtcttcagtatccttaacgtatacaataaggccatcagcatcgaaacggtccataaatccgcatggcgtagttaacagaatcggatactcaaattcgttggtgaaccatgcagtctggtcatacaggtataacgtacctgcagcaatgtaaattaaatctacaataccatctaagaagccagctttgtcgccgtctttcttagcttgtttaatttcttccatctcctcaataagacggtcatagcgaagcttgaactctggcttaccgccctgactaattggcttgaggtcaaacttctcgtggaaagctgtaacgcctgcagcaattttactgaatcgcatttcttaactccttacaaacagtttcgataaacttacgttttgtttcagtagaccagattatatgtcgggccttctctaatacgtcccaacggtctttacccacaggaaaggggacaatgaaaagtccggtgcgagatatacgcttgataaacgggaacttgcaacgcatggttgtttcaaatttgataaagttattttgcgcttcgcgtgtaaatttaaccttatcaaattcatgctcgagtgtttgagcaaggttgcatacctcatggaaagaggatgcaggcaggtagtcttcacgaccgacagtgtttacgtagtcaatttgaccttcaagacgaagtatccaaattctataataagcttcagcgacacgttgtagattcattgtatctctcctctaaaagataacttattataccacatcactctctagtggtaaagcactttttatgcttcgggtaaaataaaaaggaccagcgttaactggtccttttggcagggtggcgtaaggagatacaaggaatcgcagttatgcaaccaggcagcgcatatgagattggctaaaggactgaccgacttaatccccgcgacgagtcagaaaggaggtaccgtcgagtagccaatcacatatgcgttacttgctgtgtgctctcaccgcggaaagtatagagcgttgcacttatcataccgatggagtggcaaaagcacacagcaagtacaaccttagttgtggtgtcttagcacctgagttattgtggataacctgcacccgacgggtgtcaaaaagatacgccaaaacaccacaactaaaattgtgaccgccgtctacaccaggcgcctggggtcaaggtagcgagccaatacccttttcagcgttggaggaatcgaacctcacacatcacggcttttaccaaatctcggtcagcgagcagaattgaactgcattcactggacaccctcactgtttcaacacaccaggcttaattgattgttgataagaagagagatgtaaggatgtccattgaatgcacctccgtagaggtgcgttcagatcagcgctattattcagcaacttcttcgttgtcgccttcgatcgcgccagccagtttagcagcttcagctttagcagcttctgctttctggcgagctttttcagctttctcttcagctttgcgaatctgctcagcagctttcgcttcggctttttcagctttgatgcgagcacgctcttcagctttacgctgtttttcagcggctttagcagcatcgcgttctgctttagcggtatcaacacgcttagccagaactttaccagtggctttacgccagtaggtcagctgggaagaaacagtaccacgggacatttcggtagtggcaacaacttcgtccataacatcagagctggacttgccttcttcatgggctttatcagccaggtcccatacgtaacgtgcgccagtaccagctgccggatacagtacgccgttaacttcttctttaccagttacaaaagtcagtttctcgctcataattttttcctcgtctacagggcttaatgtttgttcgttacgtgagttaatatacgtcatttaaaagagtgtgtaaacacctttttttaacttttttcattagtgtctagaaaggcacatcatagtcaaaaagtttacatccggaagacaggactgccggcggtggtgttttgcctccggataatagacagcctcctgcctggaagctacggcagttcgcacagctcatatcctgcaggtatataataagctgccggcgaacgtgccgcggtaaagctttagcctgggttgctacccgttcaaatagttctctgtcatcgagcgccatatccgtttccccagtcgtagttcatgatttgtgggtagggtcgtttaatccataccttgatacgcttaggaatggccagctctcccttacggcgaataaactcatcgcatgtttcaggcggttctgttcctgcagcattacgccaccaggcatctgccatttgtttagcattgccatgggcctctatatttacccatgttgtatacacttccaggtttgagtagtacacaacctttatactgtcaggtcgtccctgcttctggaataaagaatagtttacaagcgtaacatctttatccacaacacgaagctgaccgttagtcattacctcttcttctgatgaagtgaaggcaatagcaggtccgttaactgtaaactcaaattcatgtccgcacatcggatatacaccattctcgtctggtgtacttcctttagccggatgtttacatgtacgagcagcatagccacttacctggtgacagatagggcactctttaccaccaggcgttttatctgaccgtttctttttcttcttaccaagacgtggcggaacagccgggtcatcaataggaccaaggtcaatggtattagatgtaaagtccataacaaggcagtcatgcttgccaggcgctgtacgtaatcctcgaccaagtatctgcacccacaaagcaacagacgtggacgggcgcaatatgccgagcatatcaatctcaggatagtcaaatcctgtagtcaatacgtttacgtttacacagacccgtgctcgtccgcttgtaaactcttccagtgcggcttcacgttctttctttgtaagaccgccatgcacaactacagtctgccaacctcgcagattaaactcgtctgctatgttgtgggcgtgctcaacactcgtggcaaatacaagaacatgattcctgtccttaccgtagtgcatcatctcacgaatagccgcgactgttatactatgctggttggctaccttctcaagctctgacgggatatagtcacccatcctttcgccaacattactggtgtcaatcttggttaacactttcttgttgaccaggcgtgacaggaagccttcatttaccagtctggtaaatgcgtcaggtgttgtaaggtcatagcagatgtcggtaaatataccgcagtcaagtaaatgaccccctgccaggcgatacggagttgctgtaagtcctgttacttttaccttaggattaagctctttgaagtgagcaataaccttacggtatgttgtttcagacttctcaggaacaagatgggcttcgtcaatgaatataagattgaacttacctgcttcttccaggttcttaatgattgactgtactgacgctacaacgatacggcctgaaaagtctttgtgtcctgcacctgaagagtagattgatactggtgcttgtggccagtggcgaacaattgctttggcgtcttgttctaccagctccttgacgtgcgtcaatataagaatacgctgacggggatagctggtaagaatatccttcatcaacataccaagcacaggtgatttacctgaacctgtcggcatgacaataagtggattaccactataagaattgaagtacgaccaccaagctgtgaccgcttcttgttgataccagcgagcttcaaaagccatttatcatctcctcattaactttatatattataccacttccttgtgataaagtatacttttattttaaggagagtttaacgggcttctcatcctgcgggaagacatcagcggggcgataatcatcacaagctgctaattgctcttcgattgtttcgagctctttctggtgcttgttacaataccacactttgccctgaagcggtttactatagcggcaggttctgcagttcctgtcgggcattgctcctttgtggcacaagtggtggtactcgcacattcctggcttgcactcccaccaaataggcgattcagaaatcttcggcatatccaaaccagattccgcatatacgacagcctctgctttgctcagttgtatatcactttcaagtaagtcaatctcgaccacttcaaaatacatctcatcggtgttcttgttaattgcaatatacacagcttgattcagcttaagcttccgcatgtatacttgcatttgagcatagtgtaccggcttactggctttaacagacttgagcttgattagctctttaaacgacttatcaccatgcgttttgaattcagcaagtgcccatacgcctttgtatttgattacacagtcacaagacccagagaagatgtcattgaaatcgtgtatgcgccactgcttacctgttttaggattgacgtccagcacttcatcacacacggaacgaagccacttcacaattctgctttcttcaaggttaccacgttcaaacagacgaagttgcttcgcggtaaacttctccttgtatgaccagtgcagtacatgccaaagatagcgatagcagttatggcctatctgcgatgctccaagatgcccgcgtcgttcttctctttcgtgggcttctactatcttgacatcaatacgcttctgcaggtcgtcaaacggactgggcattattaaactcctcaatgctgaattcatcgtatacaatattatgcgcccacaaatgagcgacggcatttgccatgctgtccttccatttggattgagaagctgtgtgtgccaatgcaactacacgtaccaggttaaggttggctatcagcatatctgcacaatgttcgcacggcgggtaggttatgtagatggtaaccgggcctaatgaaggagtgtctaactcactccttatattagctaaggtatttatctcgctatgaatagttagagcgttcttaaggctattaggcactattcttatagagtctaactgcgtaggcagaccgttatatccagtggaaataatacgcttgttctggtccacaagaacgctaccgacttgacgtttcgggtccttcgaccagcttgcaacttcacaagctatgcgcataaaccgcctgtcccacttgtccatcttcttcttttgcatggtagtctccgtatacgaaaataggggccgaagcccctattgaatatctactcggcagggattattcttcccaaggagctgctgcaccgtcatcagcaccaggtgccgttgcagtagcactcgccttcgttgaagtacccacacctgcacctactttcttcgtcgtcgatgcagttgcttgagaatgaccgcctactgcagtagttgcttcagttgacgctttgtattcgcgaatatcgttttgtgggtcgtactcaccggtcttgtcgatacgaacaccaactttaccagctacaatacggttttccagtaagtcggtagaagtcagttcaacaatacccagcgcacgacacagcgcagacagtttgcgatgaccgatttcaacagcttgtgcattagggttggagtaggtaatcatgtcaaatacaacacggttagcgaactcaccttcctgcactttaagacgcagggacaggtaagaaccagtgcctgctttagtcggcttcagctcaacctcttcaatcatgaagttgtaccagcctttcgggatcgggtcaaaagactgttgcggttcgacggtagagctgttgaagtttaattcagccattgtttggtatcctgtttaagtttagtttaatttcgtttaacgctttaccggcagcgttcggccgtgatgcttattatacgccactttttatcatggcgtaaacacttttattcgctggtttctttctcagcttgagcggctttcttcgccatccaggcttggtgcttctctttcgattcgtccgaaccgattttagtgagctgcacgttcgggtcgtcgttctgcatctgttctgcagctcgacctgtcaggagcaggtagctgtctgactccggatgatagtaccacagctggtaaggatgatagccttgcagcttgtcataaatccagcccaggtctgcaggttcacgtgcatccagctcacgacctggtgcgttacggcacttagcttcccattggtagtcaggctgggtctggatgtagcgctcgctgttaccgttggcatcaggcgcagtcatacgtaaagcaagtaccgcatccatcaggtacggcaactgcttaggtagctgttggccaggcataagaggtgagtacagcattgcaccagtaacctcgtccttgttcttctcaagcttgcacaagtatgcaacgctgaaaggcaggtcacggaactgacgcatgatgtacatcatcttgtcgttggtgttaccatacgcctgtcgtttgtcattaacctgtgacttctcgtagtccagacaaacttcagccacatctgacagcgaatcgaaaatcagatgctcatacttctgcgcatccttactttcggtaagccatttgtacagcgccagaatgtcgttgaacgtattgattggtgtagagtcgatgtcagcgtctgcaatcgacatcaaaccaccttcagcgttaataaccagaaccttgtcgtgaggcaaggtcttagccaggctggttttaccaacacctgatgcgccgtaaatagcgaccttaggtcgcttattttctacggcttgtttagtagatacaatctgaaccattaatgatagtcctcgtaaagtgattcttcatcgcagtacatacgataaagagcttcttcggcttcttccagggtgtcaaactcctcgccacagacggagtattttgtgggttcatcgaatgactcgacgatatgccagtcatgatgaataccgtatgtccacaagtcgcagtcatcttttgcaacgagcttacgtgtggaacgaaattgtgctagagtattgatgctcatattctctctcctcatgtgtatagaggtattatacaccacttacatggggtaagtacactactattttacactaacagcttgacacgatagccgtgacaaaccgaggttggctataacgccatctagcaatactcctgcatgttcttcattgtatgcttctacccacaaagggatggtgacgcccttcagatggtcgctgtacacgttgaacctatatacctgtttgtgtgctttgtcaacacgtacaacagtaaggttgccatcctcgtaaggaggaagctcaacgcctttcttactccagaagttacggaactcagcactattaacaatgccatgtacaacacgttctgtaagctctgttttgaggtcagcacgtgcctttgtactgataaagaaacgacaagagaagaaagcattgacgtttaacacatcaaccgcgtacacaacgttatgctcttcagcagttggtgctttataaacaatatatttagttttgaacaggtccatagtactctccagggaggaagactggcgggcttgcacccgcctaagttattacagcagttctgctttcagcgcagcgataccatccagcaatgctttgatgtccgggttagatgccgctaggtcagcaacaactgactgacgacgacgttccagttctttctcaacttccagatcgaggcgtgctgacgcttcacgcagtaagtcttcaacctgctgacgacgctgatacttgttaaagtcaggtacatcaaccagccatttgagagttgcagtgttgtagccagaagtattggctgcacttacagacacaacatcaacaagcttggtaccgttcagctccggatagttaacattgcgaacatcaacaaccgctttgtcacctacacttactttgccgatgtacttgtaagtgtacacacgaccattcggttcaaacttaacaccaacaaacttcagtttgtcgtctgcaataacctcttcctcaactttgaagttgattgcagtattcttgacaggtgcagccgctttgagcttagcaaccatgtactgttctgaatgagacggacggcacagacggaagacgtcttcattgtacgtcagccagttaccagtctcatccacgcatgcaatctgattagtaccatccagtgaacgaacaccagggcgattcttctcaacacgatacagcttaccttctttcaggttagcgtaagaacggcgggcgataccccagttgtgtttttcagattcatacttagcgaaacggtcaacactgaagttctgcttcagaccacggtcgtcgattacccataagttatcgtaagccccgccgaaagaacccaggttggcatacactttgccctgcgtcaatagggaagtgtttccctcgtcaacacagataacaaaacccagagcttcgtgtgctttaccgctgcggtcaaatactgtagtcatttcttgtttccttgtataccagtttaattgtatgccagagttattccctgcgcatgtgctttattgcttaaccgttaaagacattatatcattagtgagtggtgacgtacacatttattttaaggcagaagtgcaaatagcatcacacaaacaataatgagcacggtcgtagtcttcaaacaagaacacttcgccattggcgacaacttcattactgttgacctgcaggctaatacctgaatgcagaagcacatccatggcctggtccttgttcttgtacgggtcccaaataagctggaagcctgacccacaaaggagacatcccttgagctccggaagagttgactccttcacagtcacattacaaatcttagccagtttagcacgagaatcgagagtactcatttacgtttacctttacgtttgtgtagcggagtatatgttttctttggtacgccaaacatggccgcatatgtaccgacttctttctttgttggcttatccacaatctcgtcaatcacgattaagtcatggttgatattgcgaaagacttcagccgctcttttctcagcaggagtaaagtcaataaccagctctttgcctatcaggctttctttgaacttgtcaaatagccatttgtcacgcggaccaggattgcccataaacataacacgcatctgcttattgtccatggatgatataccccgttatctgtgttgccagatacaaaccgtataccacacacccaactagtatggcatcaagaatcagatgagctatcttcacgtttgacctccggaaggaatgagttatcaaccttaatcagtacgttacggctgttaaccacttccaggctggtgacatcatttttgtgggttacacgaataaatgcaacaccctcagcctgtgcctgctcaatagctttattcagcacaacattatcctgtaccatatgacgtacgcgaggaaggatattgcaaagaggttccatctcatccattcctgcagtacgcataattgacttgagaatgccgaggtggtgacggtaacggtcttcaacattatacttcttgccgttatgttttagttctgatgccatgtaagtctccaaaagttaaggggcttgtgctaagccccgtttaattactcggcttcttccgtagccgccggggtgaatattacagtcggaataccaggtgaagtcttaacaacagggtcgacgatagccagttgttctggtgtcaggttacggtatgcagtaactgacatttcatatttggttttaaacagcttggcaacaacagtcttcggtaacttcttcattacgtcaggcacaagcttctggtcaagtgagcggttaaccttctgctcaaccttgagcttgccaggtacgccatgcatgctgaactcaaccgtttgtgtaccttctttaccgcggttgataatcatgtcgcgttcaagacgagccttaatggtccggcgcaatgtctcctggtcagctttcgcttgtgccatccagcggttcagattcgccagcttgtcgtacagctgttccgtgtccatcgattccagttcttgtggggtcagtgccatcagttgtttcctcaggttgcatgtgcatagttgcaccgatcagtaagcaatagttattgaacattgtacgtagcgcttggcccgcagcaatatccgttacgtctattataccacttttagtggtgacgcgtaaagctttttctttctttgttttttccacgaatgcaatgctgatgatttcttccgcatgaattacgtggatggtacctgcaaactcaccagtcttagctggtgcctggtacactaacgacatagacggttggttactcacttaattgctcctatttatataagtccatccagttacgatactcgtcataaaaccggtcaaactcgtttttggtgagtgcaatagcaacaccatttaccagatgcatggttcgtgttttgatgttgacatacatgacattgctgtacgggaataagctaccgtcattgtcagtgaaataagtaggcgtaatatgaagcgcatcacgcaatgcaaccagtgattcaacagcttcagcgtgccattcacgtctgaaggtcatgcaaggcggtgcgccgtcttcgtcctgggtaccacgcaaagtaaggtatacaatttcggcagtatcattgtgcacaattacgctaatgtcgacgatgtcgctggtacggaaggtaacaaagtgctcttcaattacttgttcgtcggtattagggctgacgccctgaaaggtcttgagtgtgtgaaacattggttgtatctccttagcagaatgtacgtctattatgtatataaaggaggggaaagtaaatagatataaatgtataaaatacataaaagtctatttactctggtttaataacgtgtatataatgagagccccacaaacaagaggagagactcaatgataaagccaaaactgttgcggcatattcgcaacggtattaagctactcgctgaaggcaatgagtatgcctgcaagcaacgcggtattacaaaagtcggcctgttcaataaagagttaccaactcgctactttaccaaatcaccactaacactcgtacctgcagcggagtattataaagaccccgaagcagcccgggctaaaatcaaggaaggtcttgaccgacttgtagaggaaggctatttgacagtacgtcaacacactgaatcatcttattactacaagccaacttctaaggtaaccagcaatgacaatgacgagtcagccgagtgatattctcggtctgaaatactttaagccagaagggattccccaagtcttcaaagatatgaagcgctgggctatatttgagctgacgtacgaagacgagactctcgaagttcaatccaaacctaagaaacctgcaagagcgccatcaggccgttccttcagcacaacagtgcctgaagagtggatgactttcgacgacgccctgtcacgttgtattcgcaatcgtgaaatgaagattaaagctgtgcaggggaatatcacctttgtaccggctttggttgttcctcgccagtggtactttgttgacctggacaaccatgaagataacccagacattgaagctacccacaaagcgataattgaagggactcgtggcgcttatgccgagacgtcaatctctggcaaaggtcaacacatcgcaatccctttaccctggactgcagcaacctctaaagagaaagacgaccagctggacatcaaaatccagaaggctgagatgttcctggtaatgacgggtaacgtgttgagtgagttcaatgctaatcctgtttcagcccgtgaatggcatgcagcaattgagaagttctttcttgaatcaagtgcacctgacattgatgttgagtttgagcaagacgaagaccgtggcgaagagtatgacaaagagctgtacgaacagttagccgacaatactcgctgggcgcttgaacattatctgaatgagcatgcgccagacggtgttggtgtgagtaatgacggttccgaacgtttaagccgcatactcaaagacttgcttcgtgtaacccgtaactatgaagttacacaacgcatcttcatggccagcaaagctgcagcatatgaaggccgcagaccaagccgacataacctgtctgttgacaagtaccatcagtggttcagtcgtgtaggtaagactgtgctgaaagaaatgcaacgtgacggcttattcgttaagaccaagtttgctcttgacatcaacaaagagttagccaagaattcaggtgtctccctggctgagaacgttgagttcaaggtcaacgacgatattctgccttctgatgtattcgtcagaacggcaccgtccgggtttaaacggcttattgctgagatacaggataacatatctcctgctaacagggttaacgactatgccatcggcacagctcttaacatcctgagcaactgcgctggtcgcaagtatgtttgcccagtaggcggtcatgctaacttcctggtaaccaacatcattcttgtgggtggttcatcaatcggtaaatccctgtataccgagttgttcccacaaatccaggcaagtgtaccagacacatcacctatcagccttaaccgtatcccaagggaacagacttttgcaaccaggacgtttgctgaactgatgtccaacccgtcgtaccattcagtccagttgttctaccctgaatttggtctggctttaggttcaggcttacgcatgaatcctaacaaccctgacaactttcagaaagctctgatggacgcttcaaccaagcgtaaggttggcggtatactgacaggtatcaaacgtgctaatgctgacaatgatgtcaagacggtaagcgaaccgtgttactctatcctgggtgactccactcaagagcttatacttgacaacacccggaagcaagacttctcaagtggctttttgccccgcttcctgttcatcccgaactatgaacgagcggagtttgccaaacctgagaaggtagggcgtcgccagcagattcgccgtactcaattctccaaagaactgattgagaagctggaagcaatcgcttatgtgaatgctataccgcctaacggtaaactaaggcacgacccgattcctatttacgatgagtcggacgatgatgacttcctgtacgagtaccagtgcaatattaatgacatgcgccagtattacagggacaacgaagtagcatctgcctttgtgggccgaatgggtgagtatgtattcaacatagcagcactgattgggttactcgacaactgggatgctcctgtaatgaccagggacaacattgaatgggcttacaaatacgttcttcgttgtataaccgcctgggtcaataacacaagcagaatagtcgcacctccgactaccaacgctgaagtggttgacggcttcctcaaagtctacagggacattttggccctttacaccaaaagaggatggtctggcatagtcaagcattatcctgaaggtgttgtaagaagcttacgggaagaccatctgaaaatgaacgggcttagcatatatgctatccggcaatcattaagttggttcaagtccaattatggctttaacataaccgctaataacaaggttattgacggtatgttgcaggatatgattgaccaggactatttagcagtccaaatatacaaacccacaagagggaaatcggcaaatatctactgtttaaccgaacggggatacgacgaagccaagaaacttaagtaaaatcaagggcttatgtagtaaaatacgtaagcccttattttatatactctttttgctccggtagactagttatggaataaataaaccgtgtttttcgaattaagtgcacttaagttactgttttatatactcttttctttttacatgaattagtaaatatatggagccctttataaagaaaaaggggggtaataaggggatccaagtaccggataaaagggggtatatatttatttattattattattattattatatattattaattatattagaagtaataaaaacagctacttagaggcgtctatatgtatgatccggtttatctctttattaatatcagaaccggatgaaaaaaatttacgctggcgaaaaataataaaaaaccggactgataaataattcgtaggcatgtctaaagccaggcgtggcaagcttcggtgatatttactatgttattgtatgttagtgtgcgttataatatatttattattcaacagatgagttgtacaactatggatccaattgtaaaagtatttgatggtaaaaatatcacattttcatcaattaatagaggaaccaaaatggttcccctcattgttgttaaaggaagcgatttagctaaagcgctaggctacagtcactcgaaaaaactttataaaaggttagacagcgattataaaattactgacgacaaaggaatggtatgggtaactgaaccaggtatttatcaggctatattcggttcacaacttgaatcagctaaagcatttcagcgctgggcatacgaagaagttttcccaaccattcgtgggaatggttattacgttgcaccagagcttcaaccagcgctggatctactgtctgatgaaatagacttactacgtgcatatgctacagctgactgccacggaagagcaaggcttaagtcaagaattatgacagtatggaaaaaacaagtagaaaatggtaactctttggaccgcgtagtccagattttaaaaggaaacagtgcatggtaaatattcgtgttattggtcagaactttgagagaaagatggctaaaaaatttaacgaatcttttggacttgactgccagcgtaacctacagcaatcaataaatggcggggatgacttgcttggtataccgtttttcagcgttgaactgaagaagcacaagaccaagtctatcggaacatggtggagacagtgtgcggcatcagcaaaggctcagaacaagatgccggtactgatatacgaactaccaagaaaacagcctaccgtggtgatgaataaggctgatgtgattgactgttttccaagtggcacgacttttaacgaggcatcgaaccgcctctttgtgggtctagtagaattaacatgggaacaattttgccgggtctacaactattacgttgcgcccggcactcaatatcacgtcaattaatcttgtttcaactcgtcgcaaatgacacgctgatttttggcagggataataccaagatttagcagggtgtatggactatcggcgacacattgctcaacggtagtccattcaggtttggattcaacaatttcgtaactacagtcatgagtagccacacatgttgccaggattaagccaatcacaagtaatctccatcaaccagaaactcaaacaattggttgtagacgttgcaacctttagcgaaagagctttcagcaggtttaccatcgcggacgatcatcatatactcaccgccatgaatatccacccagtattgcatgccacctttgaccgggttacgttgtaagaatttaaacattatttgctccttattccaagtttattcaataaccaaattgtcatgtcaacccaggttaacggtacagttttcgggggttgataattccagcagcttgcagttctttgtatttctgcttggcgccgctccgcttcgcgtaataccgcatcgtcagaagtgccggcagaaaaaagatcggtaacaccagataaatcgcgttgattaacacgtcgagcaatgtcatataaatcatccttagaaaacataagccaataccataagaattatcagaaagatcccaaccagcttcctcatagcccgaccttcagcatatgcaggattcacaacagaatactcaacaacatgtttacatcggaccataaggcctccgcttgtgggttaattcaatcatgaggacttttggcaaatcctcattgttgaatcactctatcattacctgaactactattatacactctttattgaagcgagtaaacacttttccaccattagtgcgtttagccccagattttagagctgactggcaccagatatgccactcctcaactgtcaagaatttttgctcagctttgggtggcaatccatgggcaaggtctaccgtagtaaatttgactagtggcattacttgacctcaaattttgactcgtcgtattccggatcagtcacgtcccgggtcgcacaatttttgattgcctcccagtaacgttgggcgtcatcaccatcgacgtaaaccgtccagtggccgtaaccaccttcaaatctgtcccaggcttgttcccagactttaccatcttccagcttgtaccaagttggacgactgtcaaactcgcggattggatggtaccccaacaagggattcatcaggtcaataatgtcttcccgactaatctcctggttctcccacaacaccgtcatgaattgctcaaacttgaaggcgtttggcagaactttgaggacttcaccatcacaatatacggtataggtgccatcttcgcattttgcactgtacatgtttctctctctcttgttgtgaataatttcaatcatgaactatcacaattttggatagttcattgttgaaactatgctaattttgttgcgatctgaattgtcagccggaaatcttccatcaagttatcaaactctttggaaccaccaacagcatcagatatttgatctttcacaatttgggcatttgattccagtaattcaatcaggtgcgccaattcgtcttcagtcaatttcagatctttcataatgcatccacccaagccataacttttgccagtcttacaacgtcttcatggtcccgctcgccatcagaaaattcgctggcgatgatacccataattgacgccagattcatgttgatgatgtaggcgtgttggcgcacttcatcaattcctgaatctatcaccagttccgcaaattcttgtgaaccttcatcccattcagcccaatactgctcagcataaaagtccagttcttttttcgtctcaatgtcagtcattttgattactcctcagaacctgaaaatttgtcatcaatggactcaacaatatagtcaagagttgaagtgtgagaactatcagaaaaagtgcccatcttctccagctcaatcatcatatcccgtaaagccattgcctggtctttggtcagtttaattttaagcatgtttctctcctgttgattgtgaataatttcaattgatggcactacttgagtgccatctcaaaaattactcttcagtttcttgggtttcaggttttacttcagtttcaggttttttgccagttactgatttgccctcagtcactttaccagattttacatcattccggtagtatgacatatatgactggataactcttttggctttgatgtcatccgcctccatcccacaggctttcatggcatcaactagtgccaatttggagtcttccttatccatcaggttgtaatctttgaacaccagataacaagtatcttttgttgatggaccagatgaagatttccgggccccgccattggaagatcttgatgccacaactttgacctcttcaacttccagttggttcagttcatcaaacaatgccttcaccagcacttcttttgagtccttgacacttacagtactttcatcattaagggacttaatcatcttaatgatctggttgttggcaaagtactgaagactatccatctgcactacaatagtcccaagactttcagtagtcagaccagattttacagactcaacagaaaaagcggaagtcaggtaaacatagttgatagtagtcattgatgtatcctcattgatagaatttttgataagtgtcaatccttgacaagtaaatccaatcatgaggacttttaccaagtcctcattgttggaaattacttcaacttatccagaattgattggagtaacttgaccctcacttcctgatctttgacatcccttccactctccctgtcatattccaacaggtcactttccataaataaagtggtgtccaattggtcaaccaataattccagttcttcttgggacaattctaaaactttcatcttattactcctgatatttaacaacttgggactggataaaatccacacaatcttccacatccattgactcaaagtctggaactggaccattatttatattgacacaccaaagcccttcattggtatcataccaaagtgtgtagttgtccatcttaatagtcacctcttgtactagtttccagttgtgactactgtttccaatagtcactggttgaaactattactagtgttactatcaacaagaaacatgttaccaaattgttaaagagcaaaaggtaccattgacatctaccagatgtacctgttgactggttaagtactacctacccaaattaaaccataccaataccctccagaccagttgactggtcacacagtcatcacattcaataaatatataatagaccaatcccacttgattgtacaccttatatttgtaagtttatgcaagtttttagaaatgataatcacttgcgattgagagtggttctcatatacaattgatatagtttcacatgtaattactcacttcaaaatggtcggcaggggttataatcacataggggtgccacttaaaggagccggcgaaattatttataaaaatataatttcaatctgaattatagacgctttgtgttataacggccgaagtagttcacacggtaattgtatcaatcgcaatagttaccagagtaatcatttcgattgaaataggtgcggcggggggtaatttcgcaggggtgctacctgccaggagccagcggaattttttattttttctctattttctccttatcaggaccaatcatcatcagattgatacaacaggagctaaccttttgcttatcacaataataagcgaagcccctctaaaatttttttatatttttcaggaattgtgtagacactcactaaaaagtggtgtactttctctcctccacgcgctatcattaatatgaatcatcaaacggcctcacggtctcctacttgtgggtaacattatgaaaattgttcaattagagccatatccgcctcaattagctatcatttgcagcgaaaaagagcacgaagagctccaaaaactgatggatttgcctgattttggcaactggaatgaccgagaaacgcgtactgcatctacctttacattctctcgcgttaactatccgtacctgttaatcgtcgtcgagctgtaccacccggacgacctgaagtacaacaccatttcccacgaaggcattcacgtaatgtcatcgctgatgaactatgtagggcttaaatacgacccagaaaacgatgaatggtacgcatatcagcatgatttcgtcgtaaatgccatttgtaaggcccatgacgagtatatagagcgccaaaaagcgccaaaaactaagccaaaaatagaaactggtaaccatcctgtgatactaccacaagacgtaatgaactcgcttttgactgacactactggggactttttaggtgattaatcttatcttcgcaatgggccaaaatggggaattcgggttgtccccggagtttatgaagcatcaggttgactcgtgcaagactatggaagaggtccgtgcgcttcctaaatcgggtctgccttggaaatgtccgtcagacatgctctttttcaggactatgactaattcaattgcgacagaaccaggctacaatgcatatcagcaactacgtggacagttcccaaatgaccagttgcgaaacatgatagcagatgtaacggtaaaaatggtcgggcatagtgtattgttagccggtcgtaacacgtatatgactatgagtctgcctatgtcagcccacagaatactgctgccggtatctcgccagattatggcttcagaaggctacaataacctgggtgagatggcagcagaccttgagtccagaggtactgacgtctggattgtaggcggtgccgagttgatactttcggcccttgaagaacacgcaaaagacttactccgtatcgacaacatgtttatcagtacaatcaagcaatcaggtccaagtgatattttaatggatcgtagcaaattaatgatgtacattgatagcgacttcacttataatgatgaatatgttgataacaaacaagttctgatacaacggtacaggagtttacacaaatgaacatcataatcgagggtcccgataatgctggtaaaagtacatttattgagttccttaaatctcatactggccgcagtgttattcataatactgttgacaaagatcccaaatctgtcatggctaaacagaccaaagaaaacgcgttggaaggcgattgcatttatgaccgtagcgctgttatatctgagtatatctattgcctggttcttcaacgtacgcctgtcatcaatattaatgtatcacatgtagcagatatgtgtgacaacgccatcgttatcttttgtatgccgcctgttgaaaaggtactggcaactacaaaagacgagatgcctggcgttgtggaaaatcttgaggcattatacaaccagtatgacaacctcattgacgagctggttatgatgggcaagcagttcttcatttacgactggactgttgaagaagacggtcctgaagcagttctcgaatacatcaacgaacgtatcaataaggagtggaacaaatgagcccagtatacaatacctcagtcacgctgtcagcaaccgtaggagacgtcaacaagactgttactgtgggttcaactaacccgaacctgtcaggtgacgacctgttgcatctggctaagcgtgcgcttgaagataacgaagtgactggtactgaaggtgtcagcattgagattaacatcgatggttatgaagaaagcatcagcattactacttctgacgatgaaaccagtgaacagctaaagttcaacgacgagctggagtatcgtaccggtgagatgttcagcagtgcgctaaactggtacttgtgcaaggcttcaaactacgctggcgctcctatgtcagaccgtatgttagctgatatgtctgcacgtgaaattgctaaaggctgggcgcatgtacagatgctgcaagagcatatatgcaagctggaaagctgcaataaagacgcgtctgagcttattactgcctataagcgacagattaacgacctgcagcaactgatgggcaaacgcgctgaagaatatgaggctgagattcgcagtcttaacggcacagctgttgctaacaaccgtgctttcagcgaagagcgtaaagcgcttatcgcccagcgtgacgctgaaaaacgtcgtgcagacgacctggcagaccgtcttaactttatccgtaagcacatggatgctatggaagtggtaatctgatggacctgttcgatatggtcgaacatcctgaagtaaacggcttggcggaagctaagccgtttaactgggatgaattcgtagcaggcaaacctgctgtaacccacaacgggcagattgcatattacggaggccatagcgaacatccgatgtgcactcacctgtacaacgctataacaaccataaccgacgaaaacgttattaaatacggaaaagaagtaatgccttttcttgtagatgagcgcggttacttcgaaggtaaatggttcccgtttctggtagaaatggcctaaaaaccggataaatataaaggcgtctaagctagttcttcatctatataagctacttattcgcctttctactgtagactttcttatcacctctctagacactccatttttatattctgtttacttactccgcgtaactcgttataatccccgactatccggattaacgaggacgatacccatggcaaaaccgaaaaaaacccgtgaggcaacagaagagctgttggccacaatgcgacgtatccagctggacccgttggaagttatgcaacgggctatcatacttgctgagcgtgaagacgactacaaagcaatgatggatggtgcactgggcgttatgccgtacatgtatcctaagctgaaagaatccgttgtcaaagcagacatcgaccaaaacctgtccggcaatggcgtcaacctgaacattacaataggcgaccagaaagtggtagatactactggggaagagtaataaatgaatcttgactttcacctgcatgacagacaaggtgccgctctgcggtctcaggcaactgagattctgtacggaggtgccgctggtggtggtaagtctcaccttatgcgtgtaatgtcaattatcatgtgctgcatgatacctgacttgcagatttaccttttccgccgaaactataacgaccttacggctaaccacatggttggtcccacaagttatcctgccttgctggatggtatgtgcaaagctggcaagtgcaagattaactactcgagcaacactatcaaattctggaatggtgcgaacatcaagctctgtcacctccagtatgaaaaagatatttatacctaccagggtgctgagattcacgttctgctgatggatgagcttactcacttcacagaaacgatgtaccgcttcttgcgtaaccgtgtccgactcggtgctctcaaagtccctgagaactttttccggccactgccccttatcttttgtgggtcaaaccccggcggtgttggtcacaactgggttaagcgtactttcgtaactgctgctcctccgatgaaaatcgttaagcaggaaaaacgcgaaggtggtatggcgcgtcagtacataccagctaagatgactgataaccctacgttgatggaaaacgaccctgactacggcgaccgtcttgaaggtcttggtgacccggcacttgttgccgcgatgaaagaaggggactgggatattgttgcaggtggtgcactcgatgatgtgtggtcaaccaagtgcattctgcctcgtatgcgtattccgaaaggctggactatcgaacgttctctcgactggggttctactcacccgttctctgttggtatctgggctattgcaaatggcgcttcgcttacagacgacgaaggcaatgagtactttattccgcgtggttccattatacgtatagctgaatggtatgggtgctctgaaaaagaagctaacaggggtattaaactttctgctgccgaagttgctcaaggcgttatccgcttacaggaaaatctgcaagctggtggctggattcaaagcaacgttaatcctggtccggctgatagtcaaatttatgcgtgcaaggaaaaagacgttgagactatcgcgaagaaaatggaagacgaaggcgtaacctgggtcaaggccgacaagtcacaaggttcgagaataaatggcttagagctattccgtcagcttctgaaaaatgttaagatggacgaaacggaaaagccgggcatttatttcatggaaaactgtccagcagccataaacacgttgccggttctgccgcgtgacaagaacaacacggaagatgtcgacacgaactctgaagaccacgtatacgatgattgtcgttacatggtgttgcgtggcatcaaccgttatactaccaagctcaaaataaatatgggacggtaaaatgtcgataaccccaagcagcacgcctaatgtcggataccagcgtcctgagctgactaagaacgctggtaagtaccgaatgattaaggactgcatcgaggggcaggaagctgttaaagcacgcggtgatttttatctgcctcgtcctgaccctacgaactgcacagaagaaaacctgatgcggtacaattcgtacctgcgtcgcgctgtgttctataacgtactgcagcgaactctttcgggtatgactggcctggtattccagcagcaacctgagatgctgatgcctgatgatatggaagtgctgaaagtaaatatcgacggtgcaggtatcggtgctattcagcaaatgcgtaagtgctttaaatcagtgcttgcgtttggacgagcaggattgctgactgactttccaaaagcacgtatcggtgagtttggtgaatccattggttttacccgtaaagaactaatggatggagaagtgcagccgacagtaacgctgtacatgccatggcagattataaactggcgagaagagtatcgcaacggtaaagtgatgctcactcaagttgtcatttgcgagcaaataccgggggttactgatggctttcagcaagactacacacccgtgtggcgtcacctttacctggatgaagaaggcaattgcaaccagtctttgtgggtcaacaagggcgacaagaatgcacagaacgtctccggtggtgcgttgtatgtcacgcaagagaatgttgtcttacgcgattccaatggtttaccgctgaagtttattccgttccagtttatcggttctgaaacaaacagcgctgagattgaccctccgccgatgtacgacttagctgtgcttaatattgcacactaccgtaactctgctgactacgaagagtcatgcttcgtaacaggtcaacccacagtatgggcgtctggtcttactgaggcatgggttgaagatgttctgaagggtgaactgcgactcggttcgtttggtggtattccgctgccggctaacgccgctgtaggtattatccagaccaaccctaatacccagccgtttgaagcgatgaagcaaaaagaagcacagatgattgcaatcggtgctcgacttattcgtgagaacggtaaggtagaacgacgcgaagttgagattaagaatgaagctgcatctgaggcttcgcttatcgtaactgttgcgcagaacgttgaagctgcttatcggaaagcaatcgaatggtgtggcctgttctacggacaccctaaagaagaaattacgattaacctcagctacaacttcatctatagccagttgacttatcaagaacgtcagcagctggttaacgaatggattgctggtgctatcacgttcagtgagatgcgtagtaatctcaaacaggctggcattgctaaactcactgacgaagaagctaagaagctcattgatgaagagctggctgaacgtgatgcacgtgaggtagcaaaagaagcagaaaagaacgctcaagcagctaagaacagcgatgggcaggaaaataatccagaaaaaactgaataaagctatttactttcggtttacctggctatataatccttcatgtcaaccgcgcaacagccggccacgagagtctgcagggctcagtggatttcggatggctggctgcgcggtttgacccaaacctgttcagagcccacttgagtggattgagcccctctcatataggattgtaaaattatggcacttaaaacagttgtaactgaccttaccgaagttgatgaaggcttccgtggcctgtatatcaaagacgaagcatctggtgcattccgtttggacgttgaaccagacgaaaaaacgctgaaagaattagaagacctgcgcaaagaaaaacagcgtatggaacagcacaccaaaaagcttctcgaagaaaagaaaaaagaagccgaacgtgctcgcctggctgaagaagaacgcgcacgtcgtgagcgtgatgttgaatctcttgagcgctctatcaaagagaaacatcaggctgaactggaacagtatactaatcgtcaggcccagctgcaagctcagctggaagcgcaaatggttgataacctggcgctgaacctggctaaccaactctctgacaccccggcacttattatgccacacatcaaggcccgactgcgcgctcaggaaattgatggtaagtggcgtactactgtcgtggatgttatgggtaacccgactgctacaacgccagatgaactagtggaacatatgcgcgctgataagcagtttgcacctcttgtgcgtggaaccaaggctggcggtggcggtgccaacggcggcggagctaatcctggtgggaacggcggtggcgaacagcacactttcggaggcggggacgaccgcatagcacgtgctcgtgctaaaatccaaaacacacaatggggcaaataatttatgtcactgtatatttttaacgaacaagtacgttctaccgccaccgaactggttgaccaggacgtacagaagtttaacgaagcttctgcaggtacccttattctgggtaaccagtacgtaatcggtgattacgttgagcaggcgatgtggcagctggttgacggtatcgctacccgccgtaatgcttacgctggtaccaacaaagttgatgcgcagactctgggccagattctggaccgttctgttaagatcgacggccgtgttggtcctctgaacattaccggtactatgatgcgtcgcatcggtgcaggtgatactgaaccagcagctgttgttgctgcacaggcttctgctgcgatgttccaggactacctgaacaccactgctgcatgtctggtagctgctatcggcgcaaacgctgatgttgttctggacgtaacttcaggctctggtgctgctgcaaacatcaccatgcagaacctgaacaaagtcaacgcgaagatgggtgaccgttctcagcagattcgtgcgtacatcatgcactctactgcgttccactccctcatcgaccaggctatcaacaacacagaacacctgttccagattggtgacctgaacgtgtacaaagacttcctgggtcgtcgttatgtcgtttccgacatcccggctctggttgatggcgccggtgcttccgctaagtaccgcactctgggtctgaccccgtctgctgcaatcgttcaggtcggcggcctgtacgacatggttacctccgagcaaaccggtggtgaaaacatcctgcgtcagatgcagggtgaatacgacttcaacgtgtcgctgaaaggctacagctgggtcggtcacaaagctggtcagtctccgactgatgaagacctggctgctcaggcgtcctggtctaaagttgcgacttccaacaaagacaccgctggtgttatgttgctggctaagtctgcaatctaacccacaaacgggactaacaaacggcgagctgactagctcgccttttttatttacacgtataaagttctggtatataatcggactaaacttgctggaggctttctatggcatacacacttgttgtggaagacggttcaattgttccgggtgctaactcgtatgttagtgctgcagaagtggatgagtttatcactaacgaaggtattctcattcaaccaggaactgacccgtactaccaggctgccaaagcagctattcgactggataaccaatttaactggttaggtcgtaaggtcagcaaagcgcagaacatggcttggccacgtactggcctcggtgcatgcaatgttgacatcgcggagtctgtaattccgcgagaagttaagctggcacagctttatatgatggccagtgtattgagctatgacggcgaagaaggtgtgcgtagcgaccaggctttgcgccgtaagaaagttggtaacctggagattgaatacttcgactccaaatcaggcgttaccggcgcaactgacctttggacgtcagacgtcaaggccatgctcaagcaccttgtgggtgcatccctgagaacgcggagagtataatgattcgcattcgccttgaacgtcgcgacaaacaaaagttcgagttcacctaccgtgcctttaagtcgtttgaaggtcaaggcgtatcagtaggtgttcatccagagcacaacagacgtataaatcccagggaccgtataacaaacgcagagctagcaatggtgcatgaatacggtctcaacggtctgccagaacgaagctttcttcgtagtgctgttggtggcaggggtaaaggccgacaggcaataaacaaagttttccgcgataatgtacctgctgttcttagaggaagcatgactgcgcatgagcttaatgacaaaataggtcgtatgcttgttgatgctgttcacgacagaatggacagtgacgtgccgcctcctaacaccgagctgacagaagaacgcaaacgcgggccaggtacacttagagaatctatgcagttgtacgattcgatagggtacaaagttggcagaaactggaggctataatgctcaagataacttcgctaatgaaggataagtcctttgtggcattaacagatgttcttctccgaaatgattcgcgcttaccaaacggtgacttcgaagacgaatatacagctgcaaagtatctgtgtaacattcaacctggtgcagctaccaaccagcctaacctgttgactaaagacgatggtgagcatgagttcccacgtattgcgatatactgtggacaagaactgaagctcggagacttcgttatatacgaagaccagccataccgtgtattccgtatcgacccatggagtcgtcatggccactactacgttacagcaattctccataaaggacctcagggagctcgttcagaagcttttaacattacctgacggttcatgtattattggtgaagagtctggtacagttgatggtacaccgtatgtttatctgcgccctggcgacgcatatgacttcggacctcctagaaccagacaaggctctgacggctttgagtacgtcagcaagccaatgatgactgctgtacgcattacagctgtcggtaagaatgctgctgagctaatgcgtaagctacacatagcactgggtagttcaccagctaagcagtttaaccgtttacgacattatgcaataaccaaaatatcgaagattgataatgtcggtggtgctatcggtgcaggctatgctcagaagtcaatgatgactgttgacattagctatgtacataaagttaagattgagcaaccgtacatctacaaggttgacatcacttgtatggatgataacggtaacaaagcgactggtacagtagaggaaccgtaatggtaactggagtagacccggaactgcaagcgcagctggataagctaacaactgctgtccagctcattcatgacttcggtatgtcagacaacccaaacatccctaacccggaaggtggtgtcatacgcacactcgaaggcattaacgctgcaatcaatgaagctataccaaactttgaaaatgctaacgaagctgctatccaggcgcgcgctgctcgtgatgcagctattgcagccaaagaagctgcagaagccgcagctgaacaggctacagtatcttcgacgtcagcaatctatgagtatggcaatgttgcaagtgcagctaccgtaactatacctgctgcatctaaaacaattgtcagtcttactcttaaccagccaaacaccgtaattaatatcggtggtgtgtctgacccgtctactgttgcgcgtcagattactattgctattaagcaaggtactggttctaacaaggtgaccgcttgggatcccagaataaaatgggcaaacaacagaaagcccgttctgtcattccttgtgggttacacagatgttgttacgttgcttacctttgactcaggagcaacttggatgggtttctttaacggtggatggattaaataatgcacacgatgttgcttaaagacggatcagaccatcgagctaatgtcgaaagccttatcgaaggtcaccaccactttcttgagcgcaatactggtagaactgacgacgctacgcgtcagcactatatcttcaacccagaaggagtagtgtcgaacaaccgccattttattgcgcacactatgatggagtaccaacctaacggtgatgctccgtctgaaagtcagtcgctgctgatactcggcgaaattcacgcgtaccttgctactaaggaacagcggtatctggacaaagcaattgagtacttcaatgcttacgtcaaatactattacgagggtgacccaatccctgatactcctcgtcgctggatcgctaactggctttgtaatggcaaagagcctgtgctagccagcttcccgatcaaccctgattcaccaacacagggcggctataaaaatgtgcctgttaaatttgttaacggcaaagcacaaatccctcatggttctcctttctggggcgagtacctggatgttgctacttgggcccacaggggacacatggcttggcctgctattaatggtggtgtccgtgttattaaaaataaagttgactgggacgatatttacaacaattatcgcatcactaccatgccagctgacccgtggaatcagttagcctggattgactggccgaggtatctgggtgaaccaagctacactgtggactggtcagctgctgaacctcctgtacatctcatcgagtatattgttgcatggaccaataacaagattggtgttctgcctggcaaaaacgatgagctatggggaggcgagattcttgagactggactgcctgactctcgtagaggtgagattcaactccgtgaccacactgttaacggtgtgtatctgcttaactatgccgttaagcttcctgttgaacacggtggttatttgcttaagcgaaatgaagtatggcacaacagaccggtaaacgttccattgtacggtgagcttcaacgcggtaatgctgctgatgctgagttgtggttctgtgactgctgctatatgctgtggcgaattactaacgagcaaaagtattacaacgcttggcgagctgtcctgtttacactggaggagtatattgatattgataaacaagaccagttcttcagacaagaccctcacgcgtcgtctccgtttactgatggcatctcttatgattggacttatcctgaactggcacaagctatatattcacgtgatgaaaatggttatatagttctacgtcagaaccaaaaagctcaatcatctctggagcaacaggctgtatggtttaagtgtaagccaacagctaagatacgtaccgaggttggtggtaaagatgacgctggtcagaatataagtgtcaaggtggaaatgtacatgaaccgtgaaaaggttgacgtcgagcaaaacgtctatcgttttgtcacacagctacctgctcttggtgcttctcctgctaactacgacattccgttaagcgattttgtcgcaggtactaagccagacggttctgagtatatcttagctgatattcgttcatccactgattatggtaatgccactattgcagtgtcttatcgtactgacatactcgacaacagacgtggcaacactgttcgtatgactatacctgatagttcgtcaggtgccattataggcttttggttactggaatcttcccaggcacctttaaactcgctgacgtatacttctacaggtccgttgtacatcaaagtaactgacgcgcaaggctggagctgggtacgtgatttacctgccgcatcaggctgggtaactcagcagattcgtacatgggagttcagactggcgtcataccaggaaaacccaggtacaccacctaccagcccacaattcggcgagattaagcagttctcgtttgtactgcctgacggcgttaatacgtcgacaagtattagctggtactgtgtgaatgatgttccgcctcgctataactggccgattggttacactattaagtaccgtcttactttctcggctgataacccgtacacagctaagctaggtgactgtactgtgctggactatgagaacgataaccttgcatatacgcctggtgttattccgttctccaacatttataaccctgattctcagcagtttgacggttggcacggtctaccttaccctgggtatcagtatccgtttgtctttacgcatgacgatactgcagcaggtacaaccagactgaacaacatggttaactttttgtacgattctcagcaatggtactttaagaagtttggtcagctaggtcctggcgcatctgcttttatctggaaccgttgggataactttaaatacggtgtacctgatacgtttaccatgtatcactggggtaatggtagtgcatggtcaggttaccagcctcgtgcttatttctccgcagcacgtggatggtatgagctagtaaaccgtggtaagccagttccgagtaagcttattgcttatgtggataactggtcaaaatggttgcttgacttcatggaaaggtcaggaggtgtgtcgccttctaacttcccgcaagaaggtgttgctctgccagtcccttcagacttcacaggtcacatgtgtggactatggcttgctggtgcagctatgtcagccctttgtgggtcaacagtatcaggacttgataagctgatggatatgcttgtcaatgagctagaagaccactatgacataactggtattccggggcatgtaatggatggtggttggtcgccagcgttacgccttgaaactggtaccggacctgaaagcaacgccatgtactatggtttttactctggcgaaatattacgagggttgggcttatacctgctgtacaaaaacaaaggggctaaagcagatatttatgatttaggcccgtaaccactatttacttaaccgaggcgccagcctataataagctggcgcacccaataagaggattctccagatggcaaatcgtacaacagccaaccgtcctgttaaagacgcagacctgcgtcaagagtcggttactcagttcccgttagccaagccgaccaagcttgatgagaacggaaaattcattccaaccccagttaccggtgtaactgctacccctaaagctaagtcaattgctgttggtgagtttactactctgacagcagcagtagccccggcagacgcagatgacgtcaccgtgttgtgggaaagcgatacgcctgctaatgccactgttgatggttcaggtcgtgttcagggtatcaaagtaggttcagcaactattactgctaaatccaagcttgaccctgccaaaaccgataccgtagcaattacggtaactgctccgcctgtagccgtcactggtgttacgttagcgcctaagtcgcccagtgttgtagtaggctctactgtacagctgactgcaactgtgctgcctgctggcgctactaacaaagctgttacctacgaatcaaacgatcaggctaaagctaccgttagcgcaacgggtctggtgactggtaaagcagctggcgtcgtcaccatcactgtcaaaacagctgatggcagcgtcactgacactgtgtcagtaactgttactgctgagtaaggagctgattgatgtcgcttccacttaatgaggttgtcgacgtccagttcagtaagagcaacgggggtaaaggttttacccccaatgttccgctggaaggtataatgctttccaactacgagtactcaatcgttgcgggtgatgaccctgttcagctagttgtgcgttacattccaaacaacgctactgagcggggtatggcatggaaatctagcgacccggacgttatcactgttgatgagctcggatttgtgaagccactggcggaaggtgttgcatacgtgactggtacgtctgttgacggcggttatactgtacgagcaaagtttaacattgctcgggcacctatccttgttgaatctgttacagtgtctcccacaagtgtgacgcttgaagagggcaagactcaacgtctgacatacacctatttacctactaatgcagataatcctgatttctactggatttcagatgatgagtctgttgctgtcgttagcgacagcgggcttgtcactgccattggagatggtgaaacaactgtaaacgtacagtacggtgttgacagctctatattcgatagctgtacagtaactgttattcctcctgttgtgcacgttacaggagttgagtttcttactcagtcgcctcttaacgttaatatcggaagcacagctgggactagtattcgtatattgccagaagacgccactgacaaaacagtgacgtatgaaagcagtgcgcctgatgtagcaactgtggatactgacggaaatgttactggtgttatagttggtaatgccactgtgactgttaagacgaatgacggtgataagactgacactcttgatattatagtcagagtgcctgctgtaaatgttaccggtgtaagtattgacgaaggcgatacagcttccatggaagttggtgacactcttcagctacatgccactgtgactcctgaaaatgctactgacccatctgttgtatggagtgctcctgtatcagaagttgcgtctgtgactgaagctggtttggtaaccgctaacgctgcaggcttaatcgatgttactgttatcactaatgacgggaactttactgacagaatcgaggttaaagttacagaccccagaatcgcagttacggatgttgcatgggctcctgactctccgactaaagtaagtgccggccatcaggtgcagactaaaattgttataacacctgacaacgcaaccaacaaaaaagttagctacaatagctcaaacccagacgctattactgttgacactaacggagttatatacggtcaatcgcctggaacttcgactattacagttacaacagacgacggtggacttgttgcctcatttgtagcgacttgcacagaggtggctgttattacaccagatggtcttggtggtattccaattggtggtactcagcagttcacttatactgttagtccgtctgacgctgagctgactaatattcgttatgagtctgctgacccagctattgcaactgttgattcgtctggcgttgtaactggtgttgctagcggcggatgtaacatctggatttacgcaactagcaatggtgctgacattagcgcagctacttgggcacaaatttctgagaaggtacaggtctaccctcagtataccgaatggcttgtgggtaacaccaaacagcttgatgttaagatttatccgtctgactctaagagcgttaccgttacttatgaatcgtcagatgacactatcattagtgtagatgcaaatggcttgatgactgctaagtctgaaggttcagcaactattactgctaacgttgtgatgaacggtgttgctgcttctggcacaacatctccttacgtgtctgagctttctgttactactgactcgttgcctgcactcactgttggtaacacgcaacagctggttgtaactgttagacctgaatacgctaagacagacccaggatataacattcagtatacaactacagacgatactgtcgctactgtaagtaataccggtgttattactggcgttggtaacggtggatgtcgtattggtgccacagtaactgtgagaaacgctacagcgtcggacagctcttatcagtccgtcgatgcagcataaaattaattaactttgcactggccatttacttggttaaacttactgggtataatggccggaaagtccacccaagaggtaaacaaaaatgccgttgaatgtaaaccagattgtaaacgttcaactgaacaacactccaactggtatcagcaaaggtgacttcggtaagctggctcttttaactcaggatcctggcactgcttttcctgacagcgacaacggacactatgttgaaatcggcagctactctgaagccgagtcttattggggtactggttcagttgtacttggcgcgctgaagattttctttgcacaatctccgcgtcctcgttcagtagttatcgcctcatggagcaacaccgctactctggatgcggctattaaagcattcaacgatgtgtatcctgactggtatgttctgcgtccgcttccgcctactggcgagctgtctgacgacgacatcagtttgctggcgtcaactgttgctgcttacgacaaaaaacgttgcagctatacgactactaaagcaactcatattgaaaacagcgactccaacccgattaaagttctggctggtaaaggctacaacaatatgtggcttcagtacgataagaacaaccaacactatgcagacatttctgctatggcgcgtgctctgtctgttaacttctctggtaaccgcactacgattaccatgaagttcaaacaagagcctggtattacaccgaacaacactttaacgctcactgaagctaacaagtgtaaagcgctgggtattaactggtacacctactacagcacctttgctatgcttgcagaaggtactgtcctcggtacgtccaagccgccacgcttctgggatgaagtacatggtctcgactggttctgtaatgctgtccaggcttacgtcttcaactcaatcgctacgtcacccacgaaggtgccgcagacgaacaaaggtcacgagcgccttaccggtgctgcagctgttgcttgtcagcaggctgtcgacaacggcttggttgcgcctggtatctggtacggtgatgagtttggtacactgtcttatggtgaccgactcgaaacaggtttctacatctacatccctgacgtagatgaccagcctctggatgagcgtgaagctcgtcaggccgttgtaatgcaaatcgcgattaagctggctggtgcaatccactccagcgacatcctgattaacttcactcgctaaggagcagatcaatgatcatcgattcttctgaatgcgtgttgagcctgaatggtgttcagctgtccgactgggcagacggtgccgatgtcattgacgtgcaatgggtggacccggcttccacctatcttgcaggtgcagatggcaatggcattcagattatgaacccgtccaaagccattaagctaactatcaaggttaagcaaaatggtccggatgccaaatggcttaacgaccagtacaacctgcagcgtaacaacattcgtggatttgtcccgtttgtgctgcaagccaaagacctgttaaaccaggatttggcatggggtaaaaaaggttactttaccgatggttccccgtggactcgcggtaacggccataacccgactaccttcgctattgtgttccaccaaggtggtatgcagttgactgaaggctttgaccagtaacaatagaggaaagcacaaatgactgagcccaaatcatttgacatcgacgacgtaacgtacaacatgacactcgcaaacgcgctacaagcctggacagtcctgaaaaaagcaggtaagctgttcaaaggtattggcaacgctgacattgtgggtaaagacggcaaagtggacggtaagaaagcaatgctggtcctgttggacgctgttctggagaacgcaggttctgacgagatgacagctattgaggaactaatcttccgcaatactgttgttgtagttgatggcaaaccgcgtaagctgtctgactgtaaagaccaacacttcaacgcacatcgtagccatatcttcggtgtgcttaaggagggattggtatatcagttcgcggattttttcaaagggaatggcctgtcaggtctagcgggtctagccacgcccttgacgaaataaaacgcaagcaacagtcagggacgcaagaaactgactggttcgtttggcttcctattctcaagggtcatgtgacccttgcagaattaaagtcatcttacagcttgtgtgatttgtgcgacctgcatattgctattctggactatgccgagttagaggaaatccatggcgaccataatcgatagctttctggtaacgcttgagagtaaagctgatagttctggctttgacctcttcgaccagctgtcccgccgttttgtgattaccctcggcgatgtaatcaatcttgctgagcgtgccgctggtgcgctcggtaggatgtttgcgcctgcgttagaggctgacgtactcgccgccaagattaaaggcttcggctacgacgtcgaatcgacgtggaaaacgctgatggatatgtctttacaaatgggcacaccatttcaagaggcactcgacggctttactaaacttaaatcgtatggcgttgacccgttaaacggttcgctacaaatgctaaaaacaatcactgctgcaacaggcggtgatttggcacgcaccattgttgcgtatggccaggcgtctgctatgggttcattgcagggccaggaaaagaaccagttcattaacgccggtgttgacatctggggcgcattgtcccgctacactggtaagaagcttggcgagcttcaggatatgatgcggcagaagcaaatcactgccgacatactgactagcgcgctcaaacaagaagccgaacgtttaaaaccaattgcccacgaagtgtcacagacactcaaagctcagttaactaacctgggcacaatttggtatgctgctcgttctaagattgcccagaccagaatatgggatgaggtaactaaaggcgcgataggtatggttaagtcactcacagcagtgcttaacgataccacacttactgcggcgtttaaaaagttcgacgaagttgtattcaatacaattgaaaacgtaaaacgacttatctacgttatcggggataacttcccgttaatggtagctataacatcatacgcactgctatcacttattcccgtgctggcggcacttattccctggctagctaaggtcggcaacgcctttgtgggtttagctaccaaaatgcttatgaacccgctcacgtggtttgcactggctatcggcacagttgttgctgtactcactgacctcgacgacgctctggcaggacgtgagacagttgttaagtggtcaaaagatgttgtagccgcatggggaattgtcaagcagtatatagtagttattgcagactttattctgtcaatatttgacggtcgcttatggaacaaactcggtaactggtggcaaggtttccttgttgaagttaagcaaggcatagagcaaataaagctgtggttgtctgaagcgctttaccagctgcctggtggtaagttcctgatggcgttgtttggtaagctcgattctacactgggctttgctggcaacaaacttgtggcaggcgctgaagctactgctaatgctgtatcacctacaactgaacagggcggaagcttctggagtagggcactcaactggtctatgcgtaacttcaaccctattacaggggagatgacagctggaggccaggctatgcagtcagctataaatacagctaagcaaaaccaacaacagaacgcaactgttatccatcaggataatagcgttaaagttgatgctactattaccggtgtacagaacccacaagaagtaggtcgtgaggtcaacgaccaggtcaaacaggcgcagaaagagaatgctactgtaagggccaacaacaaaacggcggtaacacaatgagtgacatctttgctggaattactgatgctgccaacaacttgtaccaggacgcccgtgacagactcatgggcgacggtacaaccaccttacgcttccgcaactgcggaggcattaagatggatgctgtcaccaatgaggaacatcagtctgatcttgacatcgctgacaatgaacttgagtccggggctaaggcttcggaccatgctgcagtacaaccaaaagttattactgtaactggcgtggtagttggttatatcgacgagtcaattcaagagtcaacaattaaggatgtaaccggtctacggtctatggatttcttggatgatattcagcttccacaggtagtgtctactgcgcttgaaggaacaagggactttgctgttaacaagctagcatcctttatagac

SEQ ID NO: 5 - DNA, 168786 bp, unidentified
  source 1..168786: mol_type = genomic DNA; note = Found in a bacteriophage isolated from wastewater
ctttaattgaatcaatcgcttgaatcgttaaaggattggtaactgatatagatccatttgagttaataaattcaacgcaatcaccaagttcgcctctttcaatgataactttaacacctacagcagaggtatcaatatcatgtctagtaccaactttcaccggagttgcgtactctgtgatagaatgcttttgataatatccagtagcatggataatttggccgtcagcaccagtaccatttgctactgccattttacgctgatcgccaaacgcgttataaattgcattaaaatcactattaattttattaccaccgtcgaataagatatcaccagtagaagcgttaccaatttcgccggtatcaatcaatttctttggttcttgaatgaacatagcggtttccttatgagtttatagtatttataaagaaaaagggagcccatgggctcccttaatttaaaatgtaaacagaatattgatttcttccgtttgatccattgccataataataggtggcctattttccatataaatcatttcgcccgaatgcctcattaaatcttccggatcatagtaatccttttcagctttaacatttgggtcatttggatgaactttagcttcaagaggattcgtgattatcgatatttgtctaaatcctttatttcctggcaatgcagcttcaggaaaataaactgaatctaagtatgctttaaaacgaatagtatttgccttaacccggtaaattaatccaaaatcatcttgctgccaagtgaggttatcttcatacccccatctagtcggatcttcttttaattcctcaggccaaggaaccacgatatattcattcgtgcatctgtttatagatacatcaggcggaatctcaaaaagatattcccatacatacccgtctccaggttcgattgttccttccgcgtctcctcgaccttcaggaggagtcattgacctaacagaaggagtccattttccacctagcttaaggcattcatccttattagttaaagactcaattgagcacattccagtatcaggaacatctaaacaacgatatactaaccagcctgcgcctgattcggtagcgttgtaaggagctgagttacacactacaatatcgttaattctaaatgtgtatggatccggatatctagtatctccccaatctcgacgaggaataactgcatcaagcatagatggaagaaccttcacggttcccatcatatgagtccacatgtcagttacacctaacacagaatcggtgggataaggtggggcaaatcccacctcattttcgtttgatgaccacggttctgatcttccaaatgtaataaagatagtgtttttatccggaccacttccaattgaattataaaaattcaacattttttctgttctaaattttgaagtaactatcgcacgatagataacacttgaatcattcatctattttaacctgtgttggattttcagggtctcttggatttcctatattatcttttagacgtttattaactaaatccctaaattgtgcaaatgttgttccagatgcatcaaatagaggactcattaatttacgtcgttcagaaggcaattgaccttgaaatattgaattattattttcagcattatagtcatcaggaagaggatattctacgccagccattgggccaggttcataaattgcttcgcctgttactgaatcatgctcaatttcaccggttggagtcaatttagctactctatcagcgtattcagtaggcaatccagaatcccatttatagtttttgtatttattaattatagtctctgtatgtttaagagttaaaccaacattaataaacattgttaaaagagtaattgctataaatccaaatcctactggatgaacaaaacgaataacgtcagatttccagcgggaagaaggtaaattggatttaattttcattacataatatgatctacttctattaatatagtctatattattttgaagcaaatcctttcctttaaccccgcgaataatttcgccttcgaaactagggagtctttctgctttaacttcttgaccggcaattaatcttcccaaaagattatgaatagttacggtccattgcaatttaccattagaatagcttctttctatataagtaacattacatcttcctgtagctgtataaatcgtttgtcctactaagtcttcggtcaaagaatcagattgaacgattatatcatattcagtaccagccccagattcaatttcaatttcaacttcttcattataaagaactttaaaaagaaatttgtatgatgcttcaattcctttagtagaataaaaatcatagctacgtgattcaaaaaatcttgcaacagcatcacgtttatcagcatttaaataaatgtttcttttatatatctctgaccacaaatattcccacgcgtgctcttctcgcggatattggttacgaattaaatttcgtaaattattatactgagttccatatccatcagaaagatactgaatatatgcttcgcagaatgcctcaaaattagaatcctgtagcaaataagaatcaggcatcattgtgccaatcaatggtcttaaatcaggatcagctaatccatgctcttcttccggggaccaaggagtttcacgctcttggttttgtaaaaatgcttttaaaaatattccagttggcttccaaattatttcaaccgtgtctctcactcgatagttaaaatcatagtaagaaattatttcaccagaagacttataaaaaagcatcccagatgcgtattttttaaatcccgtgaatttaacatttggcattactatcgtacaatcaccatcatcccagtattcatgaactaatctatctggtgatgtttccggaatattttctataactttggtgtattttaaatcagcataaactactacagctctatcagagttgtttatccaacagcgtgtgttagattttttagaccagttaaagaatggttctgcatagtatttcatcggctgaggtgtaaaagtttcccaatcagatttttcatctgctataaatgccatcatatgataatgcttatcagctagccattcacgaggaaattcatatttaacagcaccgattaactgatacttcaccacagtttcagggtcattaacaatattatcacttaaaaatttaaaattactcgaagatagagaaactaatttaccatcagttgacatattcgcatatcccggttgaatacgtcttctttcttcttcagtgttgccaaaaactcttttccatgttttcgtgtcatgatttaaaacatatattcctttatcagcagaatcaattatttttgatgttctaggattagcatttaatgtttcaacttctccaataataagagcaaaaactttatcaccaatagaatccattttataacatactgctttaggatttccagttatagtcatagtatcaggttcaaaaagtctttccgaatatgttggagataatgggtcagaatctataggtgcattactcgtttttatgtatctaactttgtctctggcgacaacgtaaatgtaatcatcagtgcaagtaatagcttctgcaatgcggtatacattagctggcaaagtcgcgtaagtggcaaaaatttctacatcaaatcctagatgtaattggtcgccaagtttagcgaatgttatatcctgcgaactaaatctgacatcatcagctgaccatctaacatcagtagatttgcggccgtagaaaatcttgtcgtatcctagaacgtatgttgtgttcgcagattggtaatatactgtcttagataaaggatatcctacacggtcattgaagagctttacagctttccaagtttgtcctttatcattggatactttaactacaggttgataacgctcaaaaaggtataaaatcccttctgattccatcaaataaactcggttaatatccttacatacttgctgaatagaaccttgtatttcatgatactcattttcaccaataataaaattgcttattgatgaaacgtcaacatatgatgggctgaactgaaatgattcattcattaatgcagccattatagtgtcattattaaaattgacataatcagaattattaagagtaaatttttcctgaatgaatttattggctaattgcatttcaatcatgttttgaaatgtataagcatttgtagcaaaagtttcaaactcttcggtataaatccaatcagactgctcaaaatcttgcgcagcagtagctactctgataatgtatgatgtcaacgggtcagcatcatcaaaaaagaagctgttatttgcagtatatcctaagttaatccatctgtattgattactcgggagattttcccccgagtctgtttttgtctcagcgatttctacaaaatagtagaaattagcaccaacgtcatcccagcgtacttgcacctgatttgcggataacttggaaattctgagactagtgactgaaggtgcttttactgtcattgtgatataggctccaaatcgatagttaagtattgtggacgtaaatcattttcaaatacaatcagtgaaccatcgcgcgtgaaaataacatcgtctattggatcagaatatagctcaatagtctgaacctcaaatttatcggatgttaaattaattttagcgatattccaataaatcatgtcagctggataatttatttcaccgataacatagtatttgtcacgtccatcggaacttgctaatttattaaaatcattgcctgtatatggctgaatgttttcattttctgtaacatcacccgaagcaaatggaccaataataactttaccaattcctttagaatctcggtctgttgatactatacgaacgtcatataatacgtcttcttctaagccagtatcaggatttacaacctttcgtccggaattaaatgaaaacgtattagattccatagaacgatcttttatttgattattgtatttaatacccgcttcaggcgttttatagaagttttgtacttcacgtaccatctgaattgtcgccgatgagccaataatagaatgatctgcatcatctacatatgtcaacatcttagatttagcgaaagatgaattaaaaatttctacgtcttcggtataataacgatcaattttatcaattatttgaccttctagccactgttctgattcttgcagcttatttaaagcatatgtgacttttaaattagtcttaacaaaaagataattaggagaaataattgatggtgtaataggagctaaattataatctttgagataatttttaatatcttcgcgttgtacagtagttaaatatagtcctgatttaggtttagcagcaataaatgcataaccaggtttagtagaatcagtgaaagtctgaaccgcttgaataatagaaccgaatctttctgagacgaatgtatcatagtcggttgcagttacgcagcgttgctgggtttcgcgtttaatagtacccaattcgcgaatacgctcaatatcttctggatcgccgccgccatctgccccaacaaaatctgggtcatcatttggattttcgttaatattgatgacagttatatttgttaatgtatctgcgtatgaaaatccgactgcaccattcgcatctgcaccgttagtactgatgtactcaataacaatcgtagagttctgggtaggtttaagacctccaatataattagcggtcaatgctccttctgccgcgttaacagaaatctcaccttcaccaaaataaaattcagtatttccatcaatagtttcacgcatatagtaaatcgttgatgttgaaccagcatgaaccattgactttctcgtccagttaatccattccgctccatcaacatataatttaacctggtttctatcaatatttttatcataaatgataataggtgttaatttatcataaatgatttcagttcttactatacgtccctgggctaattttaaacgtggaaaatactggttatttttatcacgaatagcaataacatcttcggtagagacaaagttataaggattaacagaagtatcttttgcatatgctaaaaagcgagtaccacgaggaatagtaatgtaatttctattcaatgcgtctgtacaagttagcataatttcagtttgagcagctgattttgaagtaggtaaatatccattatcttgcgccgcttgaactactgaactacgtaagttagcagtacgcataaagctttcatatacggcagcattaccaaactgctgaatgtataatgtattataagctaaaaggtcacacagaacgtttaatcttgagccttcaaaatcataatccaaaaattcattttgaccattaagccattcaatgaggttttgttttatttcagcaaatgtacccccgacgaatatctcgggaatagcatttgctgttcttgttaattgataatttacaggggtatttgccattttgaatcctatttaatgaatactttagatgatgcctgagccacagtatcaccacatgatattggatcagccatttgaacagctttctttccagtgacatataccttagaagttctaggttgtgtcactccgccatgtgtttcatatggctttttaatttctgtatgttctgtaattggatcacctgctacgagaacagcaattcctccagtgaatactttactttgtgtagcattcacaactgttggaggccatgcttcatggccagcagtaacacacttatcataacttaatcctgacattattgcctctcatatacgtagcttctcaatttattagcccaacgactccaatttccaactatagtttttgtgtaatttttaacaagagtttttcttattggagcaggaggatcggttggttcagtagtatcagaagatgacctagaattactgccagaacctccagattcactttgttcttggtagtcatatattaatgttacttcataagtgaatgtcttctggaggttttgaggagctttccatagatataactgagtattagaatcagttggaaggtcttcccatgaagcggcagttttaaattcattatctaaacgatatttcaatgcgtcatttccaaatccaaacacagattcatacgttccatataaacgattttcttctactaaaaccccaggagtttcttcgtaactagttatatttatagatactaacgtttcacctgtttctaattgagcggtaaaggtgacgtcgatagaagaaccttccatggattctcctaaatcagcgctcattggaagtatattagccaattgttgaattctctaatgatgtaaatttataatcacattttttcaacgcttttaaaattgcgttataacttacatccgggaggtcgtgttcaattgctttttctctaaaccatttgtatttctgtggatgtggttttcccaaatcctcccaaagttttttgactttttctatactaatccaaggttcaactgatcttagttttttatttctagcatctaatctcgattttcttatcaaaggatcattccatgattgtttcgttccttctatttttcctggatgattgattaatttgtttctatattcatcggatttccataaagatttaacggtattagaaatacgaatttttaatgttggatcattttcaaaagcagttttcatcgcattactcattttctttcgatattctggcgatgcgcatctttctttgtttattttagatattttctctgaaaattctttagttgacgttgatttagctaatgccttcaattgagctttcctatattcaggattagaccacattctcttcaaatcttcggatgaaaaaccatcaccgccggattttatattggtacatagaatatcagatgatttatatttcgaaatccaatatctttctcttgaattgagaatttcataagtagaaacaaattcaattatttcaaaatctattttataaccaggtttattacgtatctttttaatataatcaccggaacctctatacttatcattttctaaatcaaaatatctagattcatgtttaccaatataaacccgtactaatcctttcggattagtaacggttgttttatatatgtatctaaattgaactgtgttagattttttcataattcacctctggaattatttataaacctatgtctatacggctaccatcaattgtgtattgaccagatgaaatagaactcatagatgccattttttctgtccaatcaccaccaacatcccaatcaactgttccagcaactttccaagaaagatttccatttactgtattagtctggtttccttcaactaaagtggtagcatcccctttaactgtaatgtcagcattaccttcaactacaatagtaacattacctttgactaggatagttccattaccttcaaccgtcttagtttcatcgccacgcacaaatatcgtattgcttccatctatttggtgaagacgattatccatgttgtaataaatttctgatccaccgacgttagtctttttatcgccggctaccaaaaaattaccatcagcgttggttatatcatacaaattatcgacagtttttcttgttcttcttcctgacggtgatacttcttcataagttccagttggatgaactaatctatatcgttcttgcccaggggtatcatcaaattcctgaatatgaccgctttcagtttccattgtatgaacatacggatattcacctttatatgaagaaacaggttctttaaataaaattctcgaatcattcggaataggagggtcagctggatcagaagactttgctacagtagcagccattgccgacaaagacctagctggtgttttcacttcaataccgtatgattccaaattccctgtaagaataatcatggtaacacgagatgcacggccttttgtttgttgataccacaatgaatcacgaccagctttatatgctttttcccaatctccggctaacatagctgttaacattgtgttaaatttagctacaccgccaacacccatctgaaatgccatattttctaatgccatttgacgagaacgattaactgctttccaaactgggccaactttagaatgtgatttaatgtcacgttgcatatcagctaaatcacgttcaaataaagttaccgcttcttccattgtaatagaacctggatttccggtaatttcacgaccaacttgttttgataaaactttattaatttgggccatatcacgaactggctgcttcatgataagatgaccaataccaattgtcggatatccttcagtatcccaataaacttttagtcttaatccttcatcacggcgaagcatttcagccattgacatatttggattatcatcagttggaatctctgatagtggtctatcatcgggatttatcgcagtatctaaattactatcttggataatattagaagacgaatcatatcctacttctccgccttggtttaatacgttagtatcatttcctagacgtctaggatactgtccagtcgggtcagaaaatccttcaagtctattaggcttttcgcgaactattccaccatacgtgccaagaacaattccgttagttttccatttgtctaaaaaatgaccataaactctagttccttctaccggaccagtaacggagcctccaattccagacattgctgcagaagttataggttgaataactgacatccatggtaatttatcagttggaatacccattacatcgccttgtgctctttgaggtggatgcagaccaaccacacgaacacgaacacgacctaattttaatgggtccattctatcttcaacaacaccaacaaaccaattaaggttattacttatcatttccataagatttctccattatacgtataaggtcgttcataaatgaattaatgtctgattttgctattatttttatttgacgaagtttttcattttcaagaacagccgcttcatacgtatcgaccgcagcaagtgctccttcatattgaggatattttctagctttatcgcctttatcataccaaacatatggattatcatcgtatgatattaaattataaaatttttcaccgttctcattcacatgatatactatttggtctccacccacatttttgtatttttgtatagatgcttgataagcagcttcttgtgaagtaatccatccataatatggatcataattatcattacacatcaataaaacccaatacagctgtggatttccatatatagtatttgctaattcttccggacgtggtgaacctttgatataataagtacgtaagcggtatcccgcaagagcgcgtttaaaatagtctttatagtttctaaaaatatctgtcataggaatagtcggcgcgtttttattcaccgttttggccgcatattcaatcggatcaaaaaatgtaaagagcatgggccctcctgtttataaatatattatctatttataaggagaatccaatggcatattctggaaaatgggttcctaaaaatatatcaaaatatagaggtgaccctaaaaaaattacgtatagatcaaattgggaaaaattcttttttgaatggttagataaaaatccagaaattattgcatggggtagtgaaacagcagtaattccttatttttgtaatgcagaagggaaaaaacgtagatacttcatggatatttggatgaaagattcttctggacaagaattttttattgaaataaagcctaaaaaagaaacacaaccaccagttaaaccagcacatctaacaaccgcagcgaagaaaagatttatgaatgaaatttatacatattcagttaatactgacaaatggaaagcagctcaagctttagctgaaaagcgtggaataaaatttagaattttaacagaagatggattacgagctcttggctttaagggggcataatggctatttttcaaataattaatgaaagcactccccaagttccaaaggttaagcaatcattaaacgaaaagaaatggattcagataggtcttgaatacaaaaaggccaaagcaaaaggaatgacaggaaagcaatttgctgaagaaagaggaatcaaatactctacgtttacttcggcaatgtcaaaatatgcttcaggaattaaaacggctgaaaagattcaaaagcttgaatcaaaaccaatgaataaactcaataagcaagaaagacaactgcttatgataaattcattcaggcaaacattgcgtgataaaattcgtaatgaaggtgcagcaattaataataaaaccagaaagtggtttgctgaaactattaagcaggtaaaaggacataaagttgttcgccctcagccgggacgaatatatgcttttgcttacgatgctaaacacaaagaaactcttccttattgggataaatttcctttgataatttacctcggtttaggtaaacataatttaatgtacggattgaacttgcactatattccacctaaagctcgtcaacagtttctagaagagcttttaaagcaatattcaaatacacctactattactaataaaacgaaattaaaaattgattggagtcaagtgaaaggatttaggggtgcagaccaaatgattaaggcatatatacccggtaatattatgggtagcctagttgaaatcgccccgaaagactgggcgaacgttgtgttaatgccactccaaagcttctactccaaaggaaaacgtttctctgcaaacaaagtttggagcaatgtacgatgaattatgaaaaaatttataattcactaattgatagggctcgcaatagagcccttactggatataaagaaagacatcatattattccgaaatgtttaggcggtagtaatgatgcttctaacttggttgatttaactccagaagagcattatgttgcacatcagctattagtaaaaatacatccaaattctttaaaattatcttatgcagccataaaaatgacggtttcaactaaatatgttaggagaaataataaagtttatggttggttaaaaagaaaacatgcaaataatatttcaaatacacaaactggacgaaaatattataataatggtaaaagatgtataaaattgcatgatggagatataattcctgagggatttattttaggaagaggatggagtccgacacaaggaacaactcattctagaaaaaatgacacatttaaaaacaaaaagcttcaatctgctttagctaataaacggtgggaaaaagaaaagaaaataatgttagataactttggagttaacactattgatgaagcaaagaaaattgttcttgattttaaatcaacttgtcatccaagatattggcgaaagccaactttagaaaaatttccatttatgacttctgctcgtttaagaagtctaataaattaattctattatcttccattcttttctgttgtttgttctaattggaattgaatggaagggacttagacccattataccaccaacatttataaagcattatgaggaatatatgtcgcaagcactacaacaaatttttaaccaagcaaatacaactaactttgtagtatcaataccgcatagtaatactacatctgcttttactttaaatgctcagtcagttcctattccaggaattaggatacctgttactgataccgtgactgggccgtttggactaggacgagcacaacgtccaggtgttacatttgagtacgatccactcatcgtgagatttatagttgatgaagagcttaagtcgtggataggaatgtatgaatggatgctaggaactagcaactatcttacaggcgaaaatactgcccaaaaaacaggtcctgaatacattacgctttacattttagataatagtaaaactgaaatcgtgatgtcaataaacttttataagccttgggtttctgacctgtctgaagtagaatttagctacacggaagattcagacccggctttagtatgtacagcaacgattccttatacgtattttcaagtagaaaaagatggtaaaattatagcagaagtttaatgcttcagtttcatgtgttataatcttaactaaatttgaggagaaacatatgaaactaatctttttgagtggtgtaaagcgtagtggaaaagatactactgcagattttatcatgaataattattctgcagttaaatatcaacttgctggtcctattaaagatgcattggcttatgcatggggcgtattcgcagcaaacactgactatccttgcttaactcgtaaagagtttgaaggaattgactatgatcgtgagactaatttaaatctgactaaattagaagtaattacgattatggaacaagcattttgctatcttaatagtaaaagcccaattaaaggcgtgtttgtttttgatgacgaaggaaaagaatcagttaattccgtagcatttaacaagattattgacgttataaataatattgaagaccaatggtcagtccgtcgtctgatgcaagccctaggtacggatttgattgttaataacttcgaccgcatgtattgggtaaaattatttgctttagattatcttgataaatttaacccaggttatgattattatatcgttcctgatactcgtcaagatcatgaaatggatgcggctagggcgatgggtgctacagtaattcatgtagttcgtcctggtcaaaaatccaatgatacacatattacagaagctggattgccaattcgtgatggtgatttagtaattacaaacgatggttctcttgaagaacttttttctaaaattaaaaatacactaaaggtactataatgtctgaacaaactattgaacaaaaactgtctgctgaaatcgtaactctgaaatctcgcattcttgatacgcaggaccaagcggctcgtctgatggaagaatccaaaattctgcaaggaactttggctgaaattgctcgtgcagtaggtatcactggcgatactatcaaagttgaagaaatcgttgaagctgtaaagaatcttactgctgaatctgctgatgaagcaaaagatgaagaataatggaatttaaagacttttcaacgggtctttatgtagcagctaagttttcagaattaacacttgatgcgctggaagaacttcagcgctctttgcgtgttcctaatccagttcctagagaaaaaattcattcgaccatatgttattcaagagtaaatgtttcgtatgttccatcaagtggaagttttgaagtagcttcttctggacatttagaagtatggaaaacacaagatggatcgactcttgtacttgtgctagattctgaatatctgcgctgtcgacacatgtatgcgcgggcactaggtgctacacatgattttgatgattacacaccgcatataacattgtcttataatgttgggcccttatcatttagcggtgatgtgcaaattccggtcgtattagatcgtgaatacaaagagcctcttaaactcgattgggcagatgatttaaaataatttcacaaagttatttacacggggttttagttgtgatactattaccctatcaaaacaaatgagtgattggagaataaaatgaaaacatttaaagaatttatcaatgaagctacttttaacgaaaaagtaaaaattagcaaagctgtcaagactttgattgctgacatcaattacctatatgatattgatttaactgactatgtaacagttggtaacaaacgtaactttttcgtgtttgacatctctgaacttgaccagaatcaaattaacaacattgagcgttttgctaatgataagggtcttcgtcatgagtcagcgggttataaaaaatacgcaatttatttaaaatgagtttacttttaaatagggttgtggtactattatctcatcaaaattaattaggaaaataaaatgaaaacatttaaagaatttatcaatgaagcggctgcaccaaagacattcgttattcatactcaagcgggtcttgatgatgagtatgtggaagcaattctgaggtcacttgctaagaacggtgttgaagtaattgcttcggactttaagaaaggggctcccgagatgtttatttctataactaaaggatctaaagctaagattaaatcatcgtttggagttgctcgtaccgatcaactcgacaatcataactttaaacaaactggcgttaaacggcagaatacgattgcatcacgcggaataaaatagtttataaaaccgtttacttttagatagggtagtgatattattaccctatcaactactgaggagaataaaatgaaacgttgtgaattaattcgaaatgttgctattgcaatttctgcttccgcttttagtttttcaatgtttgttggatttatatgcggattattgactacagcagaaaatgtgttttcacttgtagtagcatttttaattggtttaatcgctattgttatggataaaatttctaaaggtgaataaatgaatattaacgaatattatgtttatgctggggattatgcaaatccttctcattttgaaggtaatttaatacctgatagagtttttaatactccttttgaagcgtggagttgggttgaaagtaaaaatggattttcttatcgttatgttgaagtaactgattggaaaggaactaaatatcctaaagagcattattatgtagacccatctaaagtaaattttcttttgttcgcaggcgataattactatccttgtggtggatatgatgatttaattgcgtatgctgaaacagaagatgaattacgtcaaattattgaagacaataaatcaaaacgatttggcgatagtttcgactggtggcaaatcgtaaatgcccatacacatactattgttgataaaggttaataatgattctttatgcgaaagtatcatccattgaaaatggatataaatatgatcaagaagcagctaaagccttgattgatgattatggcattttaacatgttttgaagttgaaaaggtttacattgaccgttcatcttctcaagttaaattagtaaaggaagaccgtaaatttaatacagtaaattttgatttctttattgaaacagaaaaaggtcctcttgaatatgatattttcaagaatcctttgggtcttgaatgcatcgtaaacatgtattatcataaatggtaaatatgctttaagaattatttgttattattaactcatatcacactgattaataccctctatcatcaagggttcttgtttgagagcctttgttaataattgggaatcatattatggatactaaattagctgaaatttttgaaggaaaacatccaaattttagtacaggaaagctgaaagacaaaataataaaagaaaatatttttccatatgagtgtgcaatttgtaaaatttcaaaatggcaaaataagcatattgttctgcaattagaccatattgatggaaataacaaaaatcatcttaaatcaaatttaagattattatgtccaaactgtcattcgcaaactgatacttttgctggtaaaaatattaaaaataataaaaagcgttataatgttagtgatgaagaaattttaaacgcattattaaattcggctactatatcatctgcaattacttcattaggtttaagtaaaggcggaaactataaaagattcattaaaattgctaatgataacaaattatatcatttactggtaaatattaatgaaaagattttaactgatgaaatttacgaagaattagttaaaatcgattattctaaatttggatgggttagtaaagctgctaaaataataggtataagcccacaaaaagctagaaaatggatagaacgaaagtgtccagaattgatagaacagtctttttcacgtaataaataatataacgcgagaatggtcaaattggtaaaggcacagcacttaaaatgctgcggaatgatttccttgtgggttcgagtcccacttctcgcaccaaatttgcggatatcgtataatggcattacctcagacttccaatctgatgatgtgagttcgattctcattatccgctccaatttaatttactccgtgtagctcagtttggtagagcgtctgctttgggagcagaatgtcgcaggttcaaatcctgccgcggagactggaggcgtggcagagtggtttaatgcaccggtcttgaaaaccggcagtcgctccggcgactcataggttcaaatcctatcgcctccgtaattttgctgatttagctcagtaggtagagcacctcacttgtaatgaggatgtcggcggttcgattccgtcaatcagcaccaaggccctgtagctggaaggttcaagcaagcgactcataatcgccagatggtggttcaattccacccagggccatattttgggaacataaatactcttagaaataggagatatttatgttccattacacttataaaataacaaataaaattaataataaaatttatattggtgtgcattctaccgaaaatttagatgatggatatatgggttctggtaaattattaaaaagagcccaagataaatatggtatagaaaatttttctaaagaaatattagagtattttgatgataaagaatctatgcttgaagccgagaaaaatattgtcacagaagagtttttaaatagaccagatgtgtataatttaaaacttggcggtgaaggtggatgggaccatataaatattcctgggatgctaaaccagaagaaagacgctagtttaaaaggagctaaatcgtttaagtcacgttttaaaaatgatattttacttcaagaaaaatatcgtaaacatggttcaaatgtatttaaacgcttgtggtcaactcctgaatacagggaaaaatttttaaataatagcagatttttaaataagcatcatactcctgaaactattaataaaatgaaagaatctcacgccagaaataaacaccaacagggcgaaaagaattcccaatttggtatgatgtggattcattcattagatgaaaaagtttctaaacgtattaagaaaactgacccaattccagaaggatggtttaaaggtcgaaaaatgaaattttaattacggggcatagctcaattgtatagagcaacggacttctaatccgtaggttgaaggttagaatccttctgtctcgaccagacaagaaaccgggtcgctaccggtaagtcgtcggactgatgttccctgggtaaggaattgtgttaataaatctttatgatttgttgatgccctcttacatcacagcagaaacggcgcaccgaattatcgattcgaggaaatatctttgccgtaagccgagtagcgtttttgacggaacgttcggatatggtcgagatatggccttttaaaaatattaagtagcgtcaactgcttaataaccgggttcgaatcccggcgtttcgtacaaacacttgccttagcaggtggaaccccgacaaggttgccgcaaggcttagccccgaccgaaaggttggggctttttagtttgaatcacatagagaatgctgttacggataataacaaagtaataaataattaataaccaaccgataaattatttcaaggattttaaatgaaaacctatgccgaatttttaaccgaagcagcaaaattaccatctgaagcagatcttactaaagtattcttccaattggacccaaaagaccgtggcgattttcttaagtggaaagctaaagctattgaaatgtataacattgataatagttcttttacgatgagtcaagaaaataaattcaataaagcatttttcaaaatttctaagaaactggcatctggcgctcaggttcctaaatctgccttagctactcctgaacgcgcacctgttaaaatttctaagaatatgttcgacactaaaaaatacgttaatgctttgaataaagctcttgatgcattggatgatgcaaagaaggcagcccgcgatcttcaagacgtgtacatcgattttgatcgtaaaactaaaggttctatttcaaatagcgaacgcaatagtgtaagcgtttattctgatagccttgacgttcttggcgatgcgtatactgaaattaaaaatcgtattaacaccgcatctaaactaaaagctgccgcagaagctataatagctaaactagataaataattttaaatccctatctaaatgatagggctttttggtatctaggcctttccgggcctctctaggcatcatttagtttataccctttataatatattatcctaccttttaatttcctctccctgccctagaattccccaaaactttttaaaaattttttcacaaaacggtttacatccttgtccttccatggtactatatcaatatcaactactgatatagaaaacaacttggagaatgaaatggataattacggcgaactgttcaacttctttatgaaatgtgtttcagaagattttggtcgtacagtgaatgatattaaagttatcggtcctgatcatccgatgtttgaaacctatgcagtaatgggtaatgaagacggtcagtggtatactgtaaaggttgtgattaacatgttcacagcagaaggttatgttaaactgtcttctaaagtttaccatgataacgacgaaatcgcagaagaatatttcaataatatgaaataagtgtgtacaaacaccaaggacggtgttattatagatttatcaaaacaaatacagaaacggagaaataaatgactactttaactatttggtttgacgaaaatgaagaaacatactgtgtgaacattgatgaaagtccaatgcctgactttgaatcttcagataagaagtcggttatatcttgggctgaaggttataaagcagcaaaaggcgatgttaaaatagtttataaactctttgaaatataatattctcacggattttaaatcttaatcaacctaaggaaatactatgaacacactgaagaaaattgttgagtttattcgcactaaacttggttctgctatggctaagaatctatctgttgaagaacagtatactgctgcagcagcaaaactgcttgataaaattaaagacctaaaaactgcttctgttaaatctattaatgaagaaaaacgtattcgtgaacttgttatcgaaaagaatcgacaagccgaatcaaaagagcgtgaaattcgtaaacttctttccgaaggtcaagatgtaacaatgcacgctaaactcggtttactatatcgtcgaacagctgagcagctgactactaaagctgatggttatgctgaaatgcgaattgaaatcgccaagaaagtagttgagttagatgatgctcgccaagaacttgcagttaaattggaatatatccgtgaaactcgcgccgcgaatgccctcggaattagtactgctgatgatgtagttgaaattgcagcgctgactaaggttgatattgaagatactcttgcccgagttgaaacctttaatggcaatatttctggggttgaaactacctctgccgatgttcaggaatatattaattctctgaaataatgataaggggcttcggcccctattacttggagtaaataggaatgaaaaatgcaaagtgatttcaattcaatgtttgaagaattccaaagacaagttgatgttccagaccaattattaaatgctcttaaacgtatggcagaaggacgtaattattattggggttcttcatatgaaactgatgaaaatctttctggaagattttctagaggtaaaaagtctttaatacgtcctggaatacttattaacagtattgaatcaattcattcattaacatgcgattttgacgttgaatttactgattttgtttctcctgaatggacggtctgttatttaaacgacgattatgattatcttggcgtttacagtttaagtgacgcatggtttaaacgtaatttacaaaagtcaaatttgttctatattgatactacggtaaaatttcagggaaagaaatatttctttactcttatagttgattctgaaacgaagcatgaaaataaacgtattcttagtaaaaagaatatcttaactattgttgatgatctttttgataaatttgtggaaaatcccaattttgaaagcgatttattactagaaaaatttgttaaggaatgtagagaatatgtcaaagccatcactataccttccaagtaaaccgttgaagtatgaattaaagcgtcagataatttctactgatgtgttaataggtcctgtggtagctgtatcatttgtgattctgctgattgctggaatggttatagacgttatgactgatattgaatctggcgtaatatttttgttagtattaattcttccattagtagttccatttttattggtacctgtaaattgggtaggatattggtatcaaggaaggcattatcgtaaacgtgtacgtgaatggaaagctcagtgtaaaaagattaaaaaggaacaccagcttaaactaaatatgtatgaatttaatgaaattatgaaatttgttaaggaatcacgatgcaaaagccaaaactaaataaagtcaaatattctttttctgagtcatttttaatttttgctgtggcgttggctgcagctcttgctggtagtcttattggattaatgattgactgtattattttaaacatccgcagtaacgtcagcggtatagtagatataatagaagtttggagtgaacttcattatactatagcaatttcattattttcattctttagtatcattttatattttcattatgataattttaaaataaattggcaaagaaaaaaggattacaaaatacaattaaaagaatataataactacatgtcttatattgaaaatgaatcaatgaaagaattcgtgaatgattgtaggaaaatcaaatgattttaaaaactcgctggtatgatttagatgatggggatgatggcatttcagttgatagagttgactggaatggctgttccgaagatatgaaaaatttgctgattagggagtttagaatgggatatcaaccagttaagccatctactgcaacagatgataaattcgtgtgtattcataatggtcgcgctaagttaacgaacgctgattggtttacaaataagattatgattctgtggtatatcattagtcttcctgtgtcattattcgtattttactttttcataaaaaatccaatggacagaatagaagattggattcttttaaccatacttgttaatatttttacagcagcaatattatctgggatatggtacacgttcattgaaatgccatggcggctacgcagacaacaaaagatttttgatgaaaagaaatatactcaaaatttaaataactttatcaccgaatgcaggaaattaaaatgaaaacattatcagctggtattatctttatgacagaagataaagatttattcatgggacgggttactggttctcgtaagcctggaatgatggcacatcgctgggatattccaaagggccgtgtagaaaattctgatttgagcgcactagatgcagcacgaagagaatgtttagaagagactggttttagcaattataatccagaccttctagaagacctaggtgtatttaaatattctagtaataaagaccttcagttattttattatacgattccagtagagcatgagatgtttagaaattgccattgtgggtcttattttgaaaataaagatggcgttatgattccagagatggatgcttttgctcttattcctcgtacccagtggcaatatgtgatgggtccttcactttatcgaataatgaacagcctcttttaatttataaataccttctataaatacttaggaggtattatgaatatatttgaaatgttgcgtatagatgaaggtcttagactcaaaatctataaagacacagaaggctattacactattggcattggacatttgcttactaaaagtccatcacttagtgttgccaaatctgaattagataaagctattggacgtaattgcaatggtgtaattacaaaagatgaggctgaaaaactctttaatcaggatgttgatgctgctgttcgcggaattctgagaaatgctaaattaaaaccagtttatgattctcttgatgctgttcgccgctgtgcattaattaatatggtttttcaaatgggagaaaccggcgtggcaggatttactaattctttacgtatgctccaacaaaaacgctgggatgaagcagcagtaaatctagcccaatctaaatggtatcgtcagacacctaatcgcgcgaaacgcgtaatctcaacatttaaaacaggaacttggaaagcgtatatatgaaaacatatagtgaatttttatcagaatctattcttaacgaagctactgacacatttgcaactaagctaggtgcagctttggttgaagccgaaagtctattagcacgtatttctgaacttgctagtaagatagatactcgcaaatttgaacgtaccagcgatattgttaagcttgaagccttgttgcgtatgtgcgataaaccagaagaaatcgctaagaacggctcgctaatgaaacaacgtcttgaaaaatatatttcaggcgcttcagaaaaatagtgtttacttcctccaaggactttgatactatacattcatcaactacttggaggaaattatgactcgtatcaatttaacacttgtttctgaactgaccgaccaacatcttatggctgagtatcgtgaattaccacgcgtatttggtgcagtccgtaaacatgttcaaaacggtaaacgcgtaaaggattttaaaatctctccaacatttatcttaggcacaggtcacgtaacattcttttacgacaaactcgaatttttacgtttacgtcaaatcgagctaatcgctgaatgcttgaaacgtggtttcaaaatcaaggacacgactgtccaggatatttccgacatccctgtcgaatttcgtaataattatgtcccgtccgaagcgtccattgcgataagtcaagctcgcttagatgaaaaaattgctcaacgccctacttggtacaaatactatggtaaatcaatttactaaggaaaaatgaaaatgtatcaagaatttatcgctgaagcagatgccaaaggcccccaaatttaaagttaaagctttcgttggtgatgccgaagattttggctcattaaaacgtaatgggtattctttcttaggtggcgatggtaaagaaatcaacacctatgcaaaacgtagtgaaattgcttatgttgtagcaagccctaaagtagatgttgacgatattggatatgattttaacaacttcggaattatttctggcggtaaagcttaaacggtttacgcttaagtattaatatggtataattactctatcaaaacaaacaaggaaacaaaaatgaaaacatatcaagaatttattactgaagcgcgagtgagcgcaggtaaattagaagccgctataaataaaaaggcccattcatttcatgatttgtccgataaagaccgtaagaaacttgtaagcctttatattgacagagagcgtattctcgctcttcctggtgctaatgaaggtaaacaggctaagcctttgaatgctgtcgaaaagaaaattgttaactttgcttctaaattcggtatgtctatggatgaccttcagcaagcggctatcgaagcagctaaagtaattaaaggtaaataacagtttactttctcctagaattgtgatagtattattcataattacttggaggggtaaatacagaaatggacaattcatgcgccacggaatggcccaaatttagagagaacaaaatgaaaacatttttaactggaccttatctatccctgatgaatgcttttacacaccattctgatgctagagtagaagaaatttgtaaaaacgattatatcccaccatttgaagacttactcaaacagtattgcacacttcgactagatggtggacgtcaatccggtaaatcaactgcaataactaattttgccgctaattggttatatgatggtggaacagttatcgttctttctaatacttcagcttacgctaaaatttctgcaaataacattaaaaaggaattttcgcgttattctaatgatgatattcgattccgcttatttactgattctgtccgtagttttattggcaataaaggaagcaagttcagaggtttattgctttcgcggattttgtatataatcgatgagcctgttaaatctcctgatatggataaaatttacgatattcatattgaaactgtgcaccactgttgcaatagtaaatgctgcattggtggtattactcgtccacagtttttcataatcggaatgcaatgatgacagacacgcaacttttcgaatatctttatttttcgccaaaaactattaaaaataaattggtgaatcattttgaaattttggcaaataacaacgtcttgagcgaattttatcctaagcaatacaaattacaaaaaggcgtattcaaaggatgcagagttttgtgtactgctcctaatgcacggctaatgaataaaattccatattttaccatggaatttattgatggaccttttaaaggactaatcacccaaagtttaatggcatatgattctgagccatttttaattaaagaacaatcttggataaatttattttctaattgaggttatatgaaagcatatcaaattcttgaaggcacacataaaggtactatttattttgaagatggtattcaagcacgaattattgtttctaaaacctttaaagagaactcttttgtagacccagaaattttctacggtttgcatgcccgtgaaattgaaattgaaccacagcctacagttaaaattgaaggtggtcaacacctgaacgttaacgttctgcgtcgtgaaactctggaagatgcagttaagcatccggaaaaatatccgcagctgaccatccgtgtatccggttatgcagttcgctttaactctctgactccggaacagcagcgcgacgttatcgctcgtacctttactgagagcttgtaatggcaaagataattattgaaggttctaaagatgtgttaaatgctttcgcagaatggtttagtaattcaggcgaacagcaatttaatgaagcgtggaatatgggtgatattagtggaatttatcctacgacagaaatttctgttcagggatatggcattcatgaacctattcgtttagttgaatatgatttgggaacgggcgaggaagtcaaatatgattgaagatattaagggttataagccacatactgaagagaaaatcggtaaagtgaatgctattaaagacgctgaagttcgtttaggacttatctttgatgctttatatgatgaattctgggaagcgctagataattgtgaagactgtgaattcgcgaagaattatgctgaaagtctcgatcagttaactattgctaaaacgaaactcaaagaagccagtatgtgggcttgtcgtgcagtgttccaaccagaggaaaaatactaatggctcaattaagcgcagggtttggttatgagtattatactgcccctcgtcgtgtatctgttgctcctaagaaaattcaaagtcttgatgatttccaggaagtagttcgtaacgctttccaggactatgcacgttatcttaaagaagattcacaggactgtctcgaagaagatgaaattgcttactatgagcagcgtcttgaacagcttaaaaacttacatgaggttcgtgcagaagttacaaagtctatgaataaattgattagatttaaagaataactgtttacttttcctcttgactgtggtataatttttctatcagttaagaggagaataacatgactatcaacacagaagtttttatccgtcgaaataagctccgtcgtcactttgagtcggagtttcgtcaaattaacaatgagattcgtgaggcatcaaaagcagcaggagtctcatcgtttcatctaaaatattctcagcatcttcttgatcgtgcaattcaacgggagattgatgagacatatgtttttgaattattccataaaataaaagaccatgttttagaagttaatgaattcctgagtatgcctccgcgtcctgacattgacgaggattttattgatggggttgaatatcgtcctggacgtttagaaatcacagatggaaatctttggcttggatttacagtttgtaagcctaatgagaagttcaaagacccgtcgcttcaatgcaggatggcaattattaacagtcgtcgtttaccaggaaaggcttctaaagcagtaattaaaactcaatgaggtaagcatgagaaaagcactactcgctggtctattggccatttcaatgatggcacatagctccgagcatactttcagtaatgtccaactcgataacatgcgttacgcgtatcaattcggggaacaattttctaaggatggaaaatataaaacacacaaaaatatccacaagagcggattaggtcatataatggctgctattttatggcaagaaagctctggcggagttaatttaaaatctaaaccaaagcatcacgcctacggaatgttccaaaattatttgcctactatgcgagcaagagttaaggaacttggttataatatgaccgatgctgaaataaaaagaatgttgaataaacggtccaattcagcttcctgggcgtacattgaactttcttattggttaaatatacataagggcgatataagaaaagcaatatcctcttataattcgggatggaatgttaaagcaggttctaaatatgcttctgaagtcctagaaaaggctaattaccttaaaaataataaacttttggaaatagtaaatgactaaaattttggttttatgtataggattaatttcattttctgcttctgcgtcagcagatacatcatatactgaaattagagagtatgtaaaccgtactgcagcggattattgcgggaaaaataaagcatgccaagctgaatttgcgcagaaattaatatatgcatataaagacggagaaagagataaatcaagcagatacaaaaacgatacattgttaaaacgatatgctaaaaagtggaataccttagaatgttcagttgcggaggaaaaagataaagccgcttgtcattcaatggttgaccgtttggtagattcttataatcgaggattgagtactagatgattgtaaaatatatcaagggcgatattgtcgccctctttcttgaaggtaatattattgcgcatgggtgtaactgttttcatacaatgggcagtggtgtagctggtcaattagcaagagcctatcccaaaattttagaaatagataaaaccactactgagtacggttctcgtgataaattaggcgatatgtctattgtttttaaacataaacctaatggttttggcatatgttataacttgtatacgcaatacgaaccaggtcctaatcttgattatggtgctttagtaaactgcatgatagaattaaatctacaggcagaaacccttttgtttaaaccagtaatttacattccacgcataggttgtggtattgctggcggcgattgggataaggtttctaaattaatcgacatgtttactcctgatattgatttaatagtggtggattatgaaagtacattacccacatccgtttgatcctaaaaacaaagtggaaattattcgtcaatgggaacgcatttgccgtactaaatgtccaattaatagtccacatgatgtagataaagactacattggaacattcgttgaatatacctttattgataagaaaggtcgtaaacaacatgtagaagaatattgcttaaaggttacatggttatgagccaaactagtattcttaaaaatgcccactgtgaaaagtgtaagtggcctgttgtttttgctttatgtaatgatgaaatggcttgtgatttcgattattggtgctattgttctaataaaggatgcatcaatcataaaggtgaaggattttattcgggattttatccttatcctgatttcgttaaagaaggtaaaccgaaatgaatagttctgagttacaatatgaagtgttacgtgaacttgataatttaattgaactcgctgttaataaaggttttgccattggaattggtcaaaaagatactgatcatttaactgtggaaatatttaagcaaaagcgaattattttaaaacttttggaaattaatatatgagtttaagcaaagaacaaaaagataaattgtttgagcttatccatgaacttctagatgagcatacagaagcaaacaccttttatgatgaatacggcccgttatctcccgaacagcaggaagaatttgctgatcggtttgataagaaagaaaatgaattaatagcttatgtgaatacgctttaagaaggtgatatggcgagtttaatttttacttatgcagcaatgaatgctggaaaatctgcttctcttttgactgctgcgcataattataaagaacgtggaatgagtgtattagttcttaagcctgctattgatactcgcgattctgtctgtgaagtcgtttctcgcattggaattaagcaggaagcgaatattattacagatgatatggatattttcgagttctataaatgggctgaagcacaaaaagatattcattgcgtatttgtagatgaagctcagtttttaaaaactgaacaagtgcatcaattgagccgaattgttgatacatataatgttcctgttatggcttatggattaaggactgatttcgctggaaaattgtttgaaggttctaaagaacttttagcgattgcagataaacttattgaactaaaggcagtttgtcattgtggtaaaaaagcgattatgacagctcgattaatggaagatggaacaccagttaaagaaggtaatcaaatctgtattggtgatgaaatttatgtttctttgtgtagaaaacattggaatgaattaactaaaaagctcggttagtgcaaaagttataaataggtttatctaactaaaggggtatatatgctacaattaactgaaaagcaacttcgcaatcttactgtgcttcaattagatgaaattcgtagggaagttggaaatatcatttcagctttgcgtcgagaagtatcactcaaccaatctacggcagactatactagattgcgaaattttgaaaaataccttgataaagttaaggccgtgcatcggcataaagtaaatacaggacaaaaatgataggaggcctttatggccttaaaagcaacggcactatttgccatgctaggattgtcatttgttttatctccatcaattgaagcgaatgtcgatcctcattttgataaatttatggaatctggtattaggcacgtttatacactttttgaaaataaaagcgtagaatcgtctgaacaattctatagttttatgagaacgacctataaaaatgacccgtgctcttctgattttgaatgtatagaacgaggcgcggagatggcacaatcatacgctagaattatgaacattaaattggagactgaatgaaattcagcgacttttcacaaagtggaaaaccttcaaaggcagatgaatacttaggtttattaatggctgcacaagcttattttcattctgcacattttgaaactaaaagttatgctagacacaaagcatacgattttattttctctgagttgccagatttgattgataaatttggtgagcaatatttggggtattctggtagaaaatacacgccttcaattccagatgccagtaaacttcctaccgacacaattaaaatgattgatcgcatactagaccaatctaacagcatttataaagaaatgcctccagccattcaaagcacgatagatgatattactggaatgttttaccagagtaaatatcttctttccctcgaataacgttagtctccttcgggagacttttttcattttaccggtttactttccatttgagctgtgatactatacaaccatcggataaagaggagaacatcatgaaaattgaagcacttaatcaagaaggaaatatctacgtcatcattaatggtgattttttcgtcgacatggatgaagttactagtgaagaacttgtagaacttcttaagaaacgttataatatgtgtgatgaagttgcaactcacatggcgtgtgcaatattctctctttcatatgtggtggaataatgattagtatcgaacaagcggataaaattaaggaattggtagctttaattcgtaaagcagatgaggaacttagtgactttgcttggttttcatcaggcattgcaaataaaggcattgatgaacttgaagctaaagttgataatgctttagaagcgttagatatgtttcttgatgaaattatcgatcataatacgagagtttaattatgctaacacgcgaacagtttgaaaaaatcattaaattagcgcatgatattgaaatagattcataccaattagcagttgagcattgtgaaggatattcatacgacggtatagaagcagctaaaaaggatttggacaaatctaaagctaaattagttcaatatcttgaaatgattaggtggaataatgaaaactgaaaagcagatgtttttaatgaagctaattgaagaatatgctaatgcagtttctgactatgagtattctgctctggaaagaggtacggctttcgctaaagaagaattgaaaatcatggttgatgctcatacaaagcttcagaattttattgaaaacgtcatttaatggtttacaagttggcaaggttatggtatagtaatcttgtcaactgccaaggagaagagaatgaaagttttgtttgttgtgtatgtgatgattcaatataattacccaatgtttacttataatttggtaaacaacattattgatatgattcagaggagtatacaatgatgagtgaggcgaaacgattagtattagaagttagttcactttttggtgaattggctatagaaaaagtaaataatatgtatcgtttgacacaagaagacgatatgctatattttacgcctaacgaaattgttcgtttaacccaaattgaaaattcttatactgataaaattgtaagcattaatgatgagcataaaattcatttctattctttatgcccaggatttaatattgaaagcgagtcaatatgcttatcaattaataattgggataattttataactaagattaaatatttttattattccaatgaaagaaaacatagtttaaaatggcttaaaaattgcaatgctattattactaacgcttgcaatcagaatgatgaaactattttaaatgtgtcaaaatgctatgaagagggagatgtagtatctattcgtcaaattgacgattttcgatcacatatcattacattaaacaaagacgaagctattgcactaaaaacttatcttgattctgttattccaactatgatttcaaagtgaggaaatatgtttatttcaagtggaagcggtttaattcgtgttgaatttttaaaagctcaagctaaagtatgtcctgttattgaatataaggctgaataatgaaaacagtaatgaaaagttattttggtagtcatctttatggaacttctactccagaatctgatgtagattttaaagaaatctttgttcctcctgctcgtgatattcttatcggaaatgttaaagagcatatgagtaaaaataccaacaacacatcatctaaaaacactaaagatgatattgaccatgaactatacagtcttaagtatttctttaaattagcagcagatggtgaaactgtagcattggatatgcttcacactccacctgaactagtggttaaatctgatttgcctgatgtgtggaagtttattcaagacaaccgttctcgtttttatacgactaacatgaaatcctatttaggatatgtccgtaagcaagcttctaaatacggcgttaagggttctcgtttggctgcattacgtgatgtattgaaagtagttaatcaaatccctgagcaatgggttgattaccaagaagatggttctattaagcagcgtcgtactaaagttgaagatattaagcatcgtcttccagaaaacgaattctgtgaatgggtgttccataatcatgagaaaacaggcccacagacgttttacacagtgttgggtcgtaaatatcagacaacgctttctcttattgagcttaagcagtcactgaacaaattagatgctgaatacggtgaacgtgctcgtaaggctgaagcgaatgagggcattgactggaaagctctgagccatgcttgtcgtggtggacttcaactattggaaatttacaaaactggtgacttggtttatccactccaagatgctccatttattctcgacgtgaagttgggtaaacatccatttaaaacggttcaagagtttttggaagatgtggtcgatcaagtagaagcagcatccattgaagcttctaagaacggtatgcagcaaaaagtagacatgagtttctgggatgacttccttgagagggtttatcttgaaaaccatcgaagttattataaatgatagggagccttcgggctcccttttttttatttcaaaaatttttcacaaagttgtttacaagcataaagctttatggtactatacaactatcaactactgatacagatttggagaataaaatgaaaactgtaactatcaataagggtatctacttcggtaaagaaatctctggaacttttgagctcttaggcgaatggttcccagataatgctccggtagatgcacaaggagatggtaaagtttttgttgaaattgacggtaaacgtcgcggtgtttgggtttacaaatcagacatttcatatgatggtgtaaaagttgaagaagttaaagaatcgtatgaagatatgaaaacccgcattaataaaagatttaatgttatgggaatgatgacgaatggtattattaacggaaacattcgttcattaattatctctggtgcggcaggtattggtaaaacgtattctttagataaagctttaaataaagcaaatgatattggatacattgaatataaaagcattaacggtaaaatctccggtatcggtctttatgaacaactttggaataatcgtgaagagaattctgtccttttgattgatgatgtggatgttttctctgatatggacattcttaatcttctaaaagctgctctggacactggagagacccgtaaagtctgctggagcactgcatcttcttacttagaagaaaaaggcattgagcgtgagtttgaatttaaaggaacgattgtttttatcacaaacgttgacattgaccgcgaattagaccgtggtactaaacttgccccacacttacaagcattagtgtcccgctcagtttatttggatttgggtgttcacactaatgaagaaattatggtcagggttgaagatgttattctttcaactgacatgatgcaaaagcgcggtctttctgatgaagaaacttataaagcattatcatggatgaaagtcaatgttaatcgtttacgcaatgtttcactgcgtactgctctttatcttgctgactttattatgaccgacaaaaacggttgggaagaaatcgctgaggttactcttctgaaataattcataagaggccttctaagataaaaaggcagttcagaaatagattatatggactgccatcaaaaagatgactagaattaaactggtaaatggaggtaatgatgttatactcaaaggctcgtgaaatttacgaaactaaaattaaagaagcagtatttcagttcgcaacaacgatgcgatggacaaatgattgggagtattcaaaaaatcataagaagcccttggtgacaagaaaggctcatatgttagtgttaatagaccgtgagcagattaaagcccgagaagctctccagaatcataaaaaggctgcctttgaatggtttatggataacactgctcctgagactaagaaagcggtcagcgcttggttcagtggaaaaaattgtgaaagaagtttcttttagttgtttacaagaccgttcctctgtggtactatacaactatcaactacggaggaacagaaaatgaatgctaaagatattttcaacttggtaaactacaatgatggtaaatttaaatctgaagcacaaagcaagttctttaatgacatctcaatcggaggtgaaatcacggttgacggaggacaaatttacaaatctcgttggaattggatcgttattatcgatgagattggtattgtagaaatttacaaaaatacgaataaaaatcgtacattacactggtctcgtgatactaatgaacagtacaaaaaggataaagcatctaaattatctcgtgtaactcaagaagatattgagttcatcaagaaagatattttgatgtatgataacttaattgctgaagagcaagctgttattgataaatttgacgatattaaagcttctcgtgaaattcctgattttatgaaagaatcagtaaatgaacgatacactctcatttcagagcgtattgaaacttataaaaagcaaagagctgaacgccagaatactcttcggaagtttgaagaacggttaaagacggtactcgcataaccgctttataccaaggatggtataatggttctaagcccttttaactgagattattatgaaacagttgataattaaaagattgaatttattgatatgttgtttatgtatagtaattgcatatggttattatgctattaatgattatatgcattataaagattatgatgttactgtagttaatacccttacaggaactcaaggaaaggggtctagtttatcgtttattgccgtatatgaactcaaagacggttatagatttagcgaatatatttcgccggagatgtattcttcaatagaaaaaggtgataatattactgtaagtttacgtcctttcgacgtaaaacagacattgtttgataatattgtttggttctttggaatggtattagttcaatctgtatgcggtgcttatatagtcttttccatcatattctgcgtatttagtaaaattgaaattgagtgaggaaaatatgtcagtagtaattaataatgtcaatgcagtaattaaatctttagttaataaaaaattgaatgaatggactgtacttcgtcgtgaagagccagataaattttttcatagatttaacctaactttggatttgaatgttattgacagagatgttcatgcagaaattttagataagtttaaagttgatattggatttggattagaaaaacatttacagcgaacaaacgggtctggaatgggtttatctaatcgcattatgaaagcccttaataaaattggagcattgtctcgtattaatgcaagtgaaattcttctcaattataataaaggctatgatctttacggtcgactaatgccgaaattatcattcgatcaaatgattgctgatttgtgggaaaatcaacgacgattattagcattaggcgctcgattagctaaaggtctagataaacaaatgatttttaagaccaataatacagaagaccttaaatgctttaaatttagtactcgtggagatgattattacgtcagagctcgctctactgattatgttaatatggggcatcatctctgtttagcttttgaagttttaaaagaagctggaacgttagaatattcatctggtgctaaatgtccgattggttcaagttgtattttaatttatcgcccggatgaatccagtttaactaaattgcctacaaaacctgtaccagttcacagtaatgaaaaacattctgagcaaattgattattttaataagcaaattgaagagctgaatatttctattcaacagtatgacgatgaaattttcagactatctggattgagtagtaaagctaaatctgagcgtgaaaaattaattaaaattgttgatttacttaaatcttaaggaacactatgaaaactcgttctcaaattgaagatatggttcgtaatgccagctatacccgtaatgttatgacatttttgtgccaaaataatttagaccctgataaagttaatcgtgatattcactttaagtatatgaatagcagtgaatggttacgtcattttagtaaagcgggatatattacacaaatgactgctcgtgagcagctcaccgatttctgtaaaactattgattataaaaatcctctatttgttcaaggcgttggtcaaagtaaggtcgatttatcatctggatttttcaatccaaatcattatcgtattgaatggagatttattgctctattccgtagacaattaaagcaaattttgtctactgcgagtcgattaaaaggttctgacattaacttaaagaacctgaaatttgatggttatactcttcagatggaagtaagaccattaaaagaaaataatagaactgcacgaattagctttaaacctaatacaaaaaattctctttcaatttgtgaatgccttaaatcacagttgacagaagcatttaagtatatggatgttgttgccgctgttcagtctaagatttcacagcatttcgaacgatttaaattagacacaacaacgtatgaacttgatatgatcgtttcatttaaatatgaatttttgagaaaagatgaagtcccgcaagagaaaaagcaggaagtgcaagataacttaaatttatctaattactcatcaaacgatcctaaattttggatgtatagttcaggtaataaagatgcatggaaattcaataaagtgaattttcttcctgttgaaaatccgagtcttaaacctgttgaaaaatggcacgcggatgcgattgagaagtctcttaaggcagtagatgatgaactcgttaaagcgaccaatgaagtgttagaagctgaaaagatgctagaaaaagcacaagaaaaagtcaaaaatctcacgaagcaacgttctaaattgaacaatgcactaaatgcactgaactagtttactttgccacaaggatgtggtataatgttcttactttctactgaggagattattatgactcgtaacgaatatatcaaatcattcaatagcgttattgatgataaagctataccgatgtttggccaaaatagcgttctttctattatcaatcaatggctcaatagtgttgatgcaggtattgtttcttctgctaaatttattcatgaaattcgtaaaatttctagccgtgtagataaagataatatcaagaaaacttttaaagagtctcgtcttctttcatatttggttaatcgggatattctaggtaattttgggaaagaaattaaacgaaccaaagatgtagtaggatataattggttcggtgatgttaattcttatcatcttaataataaagaagaccctgagaatatttttactcgtcgttggattagtaatttcagacttttcaaaggacagattctaaaatcagcttctaaattatgttatggcgattatcgtcaaattcatcctttggcttctgatatgattatcataaaagaatatgaacttgataaaaataaagtatctatttttgtgaattatggattttttacaccagaaactaaccaaaagaacattaataaatttttctcaattgctagcactataactcgtcaattagagaccgcattactttgtatggaaacagtagaaaatattcatacatatccttttaagaatatatgcggctgggaaggatataaaattgtaattagtcttcgtgaagtaaagtgcgcgtactcaccgactaataaagaaatttaccaacaaaaatgtgatgaaattgtgaatactcctaaagaagaaactacccttgaggaactaatggaatgtcttgacgattcacctgaaccggtagaaattcgtccagaagttattgcactagaaaaagcttataaagaagctctagaaatttctaataaagcgcagaaagaatatgagcaggctaaaaggatttgggaagaatctgttaatcgcctggatcgtttggaacaagctttacagttaattaagtaatttaaagccaaggatggctcggagtataaatcattaaccaagtgagaagaacatgaaaactcgtaaacattatattgattattttgatagtcttattactaaacatcgtaattatcagataggacacagagcagtaatcaataatattcttcgtgattttttagactatattggatgggaaaaccatatttgtaaagatacacaaaacgcgtattcacattctcttggttctttgctcgagtggttcaaacgttcccgattactatcttctgtgatagctgttaataatgttaaaaaatttatgtatccaagctacattgagactaatgtatcaaatgctaatgttgttacatttaatattattaatgacgtgaaaagaacttatttagaagaatggttttctaaaaatagtaaagaaaaatttgctagtgagttttcacacgaatttaataataatgtgaatatgctttttaagcattctcgtagactgttttgtcatggcgatgaccgtactattaatgtaaatgtaaaagattgggttacggctaaattcattccatcgcagaatggaccagttgaattgtcaattattgtttgtgctccacatgaaatatataaaaatcttccatatatgaaaccatgcgaagctaataaacataataaaacgattcgttctttgacttataatcttcgtacgttattgtctaaaatggacgtagttgaatcctttgatgataatacgaattatggtctttcactgtttgaaactaaaattgttattaagttaaaggaccctagtaaatttaaacctacaccaaagcccaatcatgggaatgatactatgaaagaagaacgcgaatatctcagtgctcgtttgattgaagttgaaaaacagattgaagagcatactaaagttcttaaggctttaacagccaaagcaaatggtttacgtgatgctattgaggtactgaaatgaaaaagcgtttattagaagatattgcagcttcaagtaattccagtctaattaaaattattatggctggtgaggaagatgatatggaaatgcgtggaaagattcacggctgcgacgatttagattttaaacctccagcatgggatgctattatggctatggttgaacgacgtgaaagagcttctaaaaacgttcctaattgccctgagtgtggaactgaacaggtgcaattggtccattggcagactaataatcttcgttataaatgtcgtcattgtaaacgccgatttgaccgagaagaaaatgacaaagcgtaaagaatatatggaggctgctgaaaaggcagtccgtgaattagcaatagcttattataatgaacatggtaaatttcctgatagatacagcgtgcttaaatcagctttaactcgttcatataaaaatatgctatcagaagtaagtgatattatatacaaacataaagaacaaacgggccaaagtcttgattacgacgagacttttaaacaagtactaggaattaaggaataatatgtttaaagtatatggttatgatagcaacatccataaatgcgtgtactgcgataatgcaaaacgtcttttggctgtgaagaaacagccgtttgaatttatcaacattatgccagaaaaaggtgtttttgatgatgagaaaattgctgagcttctgactaaactaggtcgtgatactcaaatcggtttgacaatgcctcaggtatttgctcctgatggaagtcatattggtggatttgaccaattgcgagaatattttaaatgatgcttgaaggaactgactatattcacgattaccgcggcagcgcggtatatgtaggtgatgaagttgcagtttactatgggtatggaactttgatgacagccaaggttattcaaattaaaaataatcgtgctaaactcgaagtttattattctaacggcgaaaagtctatttctaagtggaaatacggcgattgcatggtcaaactgggggtaaatatgatatacgatattagtgcagcaagagctccatcaatggttactattcctgttgaagaattagatcgtcttcataaaattgaagaacttctttgggaaattgaatgtgacctgccatcagaattagaatcctggattgattatgaagaacttaataagcttcggggttaaaccttggtgggcggctagatgggaaactgtagagccagagccggaagaaccggtttacactgatgaagaaacagtatataatgaaccaacgataaatgacttaattgatatggagatgggacatgattacagtagataagtggtttagaattaatcgtgctgatacagggctgtgtaattactggccggaacttagtgcaggtactgtctttaaagttcgtgaacttgcaaaagaatgtgaagatgatatagagcctgacactggaattattgaaattgaactttctgatggaaaaattattaacatctacgataagccaattacgtattggtgcttgtggaatactgaatcagtcgaaaatggcgaaattgaagaagttgtagagcgaactaatcaagttgttcagaagcctaaagccgattttcaaggtgaacgtatttcatacgcattagctaaattagctgcacaagaaaataacgatggctatgaaggaaatttgatgcaagctgcggcagaatatattgaatggcttgaaacccaaatttctttttctgaccaaaagattcggcaatataagcaattgaatcaaatgttttacaatacttgaaaataataaatacccttatctatttaaggtaagggttttattatgttattgactggcaaattatacaaagaagaaaaacagaaattttatgatgcacaaaatggtaaatgcttaatttgccaacgagaactaaatcctgacgttcaagctaatcacctcgaccatgaccatgaattaaatggaccaaaagcaggaaaggtacgtggattgctttgtaatctctgcaatgccgcagaaggtcaaatgaagcataaatttaatcgttctggcttaaagggacagggtgttgattatcttgaatggttagaaaatttacttacttatttaaaatccgattacacccaaaataatattcaccctaactttgttggagataaatcaaaggaattttctcgtttaggaaaagaggaaatgatggctgagatgcttcaaagaggatttgaatataatgaatctgacactaaaacacaattaatagcttcatttaagaagcagcttagaaagagtttaaaatgacaattgaaaaagaaattgaaggattgattcataaaactaataaagaccttttaaacgagaatgctaataaagattctcgtgtttttccaactcaacgggaccttatggctggtattgtgtctaaacacattgccaaaaatatggtcccgtcttttattatgaaagcgcatgaaagcggaattattcatttccatgatattgattattcccctgctcttccatttactaattgttgtttagtagatttaaaaggaatgcttgagaacggatttaagcttggtaatgcacagattgaaactcctaaatcaattggagttgctactgcaattatggcacaaattactgcacaggttgcttcccatcaatacggcggaacgacttttgctaatgtagataaagtactttctccttatgttaaacgcacctatgcaaaacatattgaggatgcagaaaaatggcaaatcgctgatgcgttgaattatgctcaatctaaaacagaaaaagatgtatacgatgcattccaagcttatgaatatgaagtaaatactctctttagttcaaacggacaaacgccttttgtaacaattacatttggtacgggaactgactggactgaacgaatgattcagaaagcaattctgaaaaatcgtattaaaggtcttggtcgtgatgggataactcctattttccctaagcttgttatgttcgttgaagaaggtgttaatctttataaagacgatccgaactatgatattaaacagcttgctctagagtgtgcaagcaaaaggatgtatcctgatattatttcagctaagaacaataaagctatcacaggttcatctattcctgtttctccaatgggttgccgtagtttcttgggtgtatggaaagattcgactggtaatgaaattcttgatggacgtaataatcttggcgttgtaacactgaatcttcctcgtattgcattagattcttatattggaacacagttcaatgaacagaaatttgccgaattgttcaatgaacgaatggatttatgttttgaagcattgatgtgtagaattagttccttaaaaggagttaaagctactgttgctcctattctttaccaagaaggtgcattcggggttcgtcttaaacccgatgacgatataattgagttatttaaaaacggtagaagttcagtgtccttaggatacattggtattcacgaattgaatattcttgtcggtcgtgatattggacaagaaattttaactaaaatgaatgctcatcttaagcagtggactgaaagaactggttttgcttttagcttgtattctactcctgctgaaaacctgtgctatcgcttctgtaaacttgataccgaaaaatatggaagtgtaaaagatgttaccgataaaggctggtatactaacagtttccacgtttcagtagaagaaaatattactccgtttgaaaagatttctcgcgaagctccgtatcatttcatcgcgacaggcggtcacatttcttatgttgaacttcctgatatgaaaaataacctaaaaggtcttgaggctgtatgggattatgctgcgcaacatttagattattttggcgttaacatgccagtagataaatgttttacgtgtggaagtacccatgaaatgactcctactgaaaacggatttgtttgttctatttgtggagaaactgatcctaaaaagatgaacaccataagaagaacatgcggatatcttggaactcctagcgttgttccatggaatttaggtaaaatgaaagaaatggtaaaacgagtaaaacatgcataggtattatataatttataaaataacaaatataattaattcaaaggaatatatcggtgcgcatagcaccgataacataaatgacggttatatgggatcaggaacattgattcgtgccgctttattaaaatatggtagaaaaaattttaataaagaaattttacatgtttttgataatgaaaaacaaatgtatgataaagaagctgaacttgtaaccgaagagtattgtctaaaagaaaatacatataatattaaacccggtggaaaaggtggaactgcttatgaacagacacttgaacatcgccacaaaaatagtttagcaaataaaggtaaaaagagaacagaagaaactaaaatagctatttcacgtgctttaaagaaatataaacgtacgccagagcatcaagcaaatttaaataaagccgtaagcatagctatgaagcgaaaagatgttagaagtaaattagctggagagcggtctgagaaagataaattatctatatcaaacggtgttaaaaaatattacaattctttgagtgaagaagaacgcgaacttcatcgcaagcgaattattgaaggtaaaaagaattctcccatgtcattggaatctagacaaaagctttcaaaagctttaaaaggacttcaagttggttcaaaaaatccaatgtatggaaaaatttctccaactagcaaaaccgtttcagttgacggtattaaatatgattcaattaaaaagtgctcaaatgccataaaagtttctagacatcttatactaaaacgctgtaattctactgatgaagcttggaaaaattggatattattatgaattatgacagaatatacccgtgctgctttgttaatggtcctggatgcaggacaattcttttcgttacaggttgtttgcataaatgtgaagggtgttataataaatcaacatggaatgctagaaatggtattccattcactggtgaaacactagaacaattgattgaatgtttgaataatgattatatagaaggattaactataactggaggagaccctctctatcctgataaccgagatgttattcattgcattgttcaaacagtaaaaaatctttatcccaataaaagcatttggttgtggacaggatataaatttgaagatattaaacaactagaaatgcttaaatatgttgatgttattattgatgggaagtatgagaaaaatcttccgaccaaaaagctgtggcgaggatcagataatcagcgactttggtcaaataccgatggggtgtggaaacatgattaaattgaattatattatggacactataaatgatatgatttttcattttggtccagaattttattcgcaatatagtttagtgcttatcaatgcttggttaatcaattaagggtaaatatgtataaatttcgtaaaggtttagctgattttcttacaaccgtaacattctttttgtttatggcagttggagctattttccttattccttttattgctatatttttcgtgattagtttgatttctccagaaaaaggactatcttctagtgagttcaatgagcgtctggataaaattactaataagctgaattctgctcttagtaaggaatagttgtgaaacaaaacaagattgaagtctatggaattccagatgaagtaggtcgttgtcctggatgtcaatcagttacaaaacttctaaaggagctcaatgctccttttactttctataaagttcttacaaataatggtaagattgagtatgatcgtccactgattgtatctcttgctaaacgcgctggattcacatctcttaacattcgttatccagtcattttcatcaatgattctagacaaaagaacattaaacacttcaaagaaactctcatttcacttggatatgatagagatatcatagaagactaagacgggccctctgggcctttctttcttacattctgtatattaccattctaagctatcgttcctttcttatcattccctaaaatatttttcacaaagttgtttacaacaagttcaaaccgtggtattattaacacatgaattgcctttgaggaattgatatggttatgattgataaagaaattaaaaagggacagtattatcttattaatggtaatgctgttcgtgttactcatgtaaatagttttgaagtttgctatattatactcaagttacataaacacatgatttgtgatcgtgctgtatttagttcagttgctaaggaaattaaactccatgggtaaaacgtatcgtcgtaaagacttgaaagttcgtgattatgactatttcggaaagcgtaaagctcctgatggggtaagtcataaagatatggttgaaaacatttttcgctcagataaatggcgtagaatgaaaggcattgattcagaagttaaagatgagctaaatcgtcaattacgcggtgaagtaagaaagttgaaaaaatcagtttacattgacgatgattttgattataatacttctcaacgagttgctaaacgtaaatcaaacgagtgttatcgttacagctgaggaaaatatgaatatcaaacgaatgctttttaaacaaggactatatactttaaatgttactccaaaaggcgatacgaccaagtggtcagtaaatgactggattaaatttattgatgaaaatggcaattgggaaatttaaatgaatcctgaatctaaattatcacagcgaattgccgaagctcgtcgtcagttctttgaaaatatgatagcccaaggtattgatgacgaagtttttctaaactggttttggaatcacaaatattcaaaatgctcaggagcaatattaatatcagccgcaatgatgtacgaaggctggaagggtgccaaacagtttagctaagggcttcggccctttttggataataaaattttaacgtaattgaggataatgtatgactattcagattaaaaacgccattaattcttatgcatatgataaagtagtttctttgctagaaaaaggcgatattgtaactcctcaaattttggataaatgggaaaaagagcttcatcaaacgatgaaacagaatgatcagaagattggacgcaatactgtccgtgaattgttggttcaatatatcttgtcagaatttgatgttaaagcttttggcgtagaatctaaagcttatcaaaagcatgaaatttccgataaaactattcgtcgcatgaaaaatcaacgcaagaaaaaatttgcagacctgaaaattactaaggtataattatgaacgaagctcttattaacgatttacgtcttgctggatatgaagtaaatacaaatggcattggtttaactcaaattgaaggaaacggattcatccttgagtatgaatttagccaatggtggttatatgccaattacggcgaattgattgaatatgttgaccaatttgattcactagatgcagctcttggagcggctaagttgatgaatgcatgaaatttattaatatttctattactattgaaaattatggcattttctatgttgaccaatacatgaaaatttcatttttcccaaataagactggtgttggatattgggaaagccatgtttctgaattaaatgaaagtgaatatgttagcacacatgaaaagtttttagactttttatatcatgctgatctaactagtcattatatagatattcatgaatttaaaaagatgatggagaaagtattccaagcatactgtttacttagataactgatatcctctatgctttaagatagatcttcaaatattatgatataatagatctatgaattgagctaagaggtgaaaatgtcagaaactaagcctaaatataattacgtaaacaataaagagcttttacaagctattattgattggaaaacagaattagcaaataataaagacccaaataaagtagttcgtcagaatgatactatcggattagccattatgcttattgcagaaggcttatctaaacgtttcaacttttcaggatacacccagtcttggaaacaagaaatgattgcagatggtatagaagcttctattaaggggcttcacaattttgatgaaacgaaatataaaaacccgcatgcgtatataactcaagcttgttttaatgcattcgtccaacgtattaaaaaagaacgtaaggaagttgcaaagaaatacagttacttcgttcacaatgtctatgacagccgtgacgacgatatggttgcgttagtagatgaaacttttattcaagacatctatgataaaatgacgcattacgaagaatcaacctatagaacaccgggggctgaaaagaaaagtgttgtagacgattctcctagtttggattttttatatgaggctaacgattaacctctccggattcttggaagaaatacctgaagttgaagctattccctatttacttaaaatgtatctcagggaagttttagctcttgacattgatattgatccagaaaatccgtatgataccgcttttaaatctaatggtgtagaattaaactatcggtatcatttaacagatgatgatttttattttatattagagaaataatatgactgataaacccgaaattaatgatgaagtggaaaagcttatttcttctattgaagaaaagaaccgtcttgaagcagaaagaaaagcaaataagttattgtctaaaaacaaacgcgaactgaaccgtctttataagcacgctcagattgcagctgaaaacaataattttgctcaatacgaatatgctatcaagaaaagtcgggatattctaaaacagccatataacgatgaactcatcagtattctttggaagactactagatcgcaaattgaggatatgattgatgcttacacacgtaaaattcaagcgtcttaaaattaatgcaggatttactgaatctttgaatggtcatctttgtgtgaaaatttctgaaaaagaataccatgatagttcaattaaagaagttaatcctcctattgtaagagcagaccctaatatgaaagtgtgggttgattcctatcaagtcaaaaaatggtggcaactatgaaagatgaacacccagacttctgaaatagattataataaaattcgttcctctaaagaggaaatgatgagacgctttaaagagtctcatgataaagctaaagcagaaggaactataaaatataagcgcataaaatttaaaagttctaacgagcctctgtatggcgtattatgcggataggagcttcggctcctatattgctttataaatttttggtaaaataaaccaaaacaaagaggatattaaatgaaagtatgtatttttatggctcgaggtcttgaaggttgtggtgtaacaaaattctcactcgagcaacgtgattggtttattaaaaatggtcatgaagtgactttggtttatgctaaagataaatcatttactcgtaattgcgcgcatgattataaatcattttcaattccggttttattggcaaaagaatatgataaaacacttaagctggtaaatgattgtgatattctaattatcaattcagttcctgctacttcggttgaagaagacactattaataactataaaaaaattattgataacattaaaccttcggttcgtgttgtagtttatcagcatgaccattcttctctttctttgcgtcgaaatttgggattagaagaaactgttcgtcgagctgatgttatttttagccattctgataatggtgattttaataaagttctgatgaaagaatggtatccagaaactgtttctctgtttgatgatattgaagaagcaccgacagtatataactttcagcctcctatggatattgcgaaggttcggtcaacttactggaaagatgtttctgaaattaacatgaatatcaaccgttggattggtcgtacgactacatggaaaggtttttatcagatgtttgattttcatgaaaaacatcttaaacctgcaggactaagtactattatggaaggtctggaacgttctccagcgttcattcctattaaagaaaaaggaattccatacgagtattatcgtcttcatcaagtagaccaaattaaaattgctcctaatttgccaacgcaaattcttgaccgttatgtaaatagcgaaatgcttgaacgcatgagtaaatccggttttggttatcagctgagtaagttggataaaaaatatctgcaacgttctttagaatatactcatctcgagcttggtgcatgtggaacaattccggtattttggaaatctactggcgaaaatttaaaattccgtgttgataatactcctttgacctcacatgatagcggtatcatttggtttgatgaaaatgacatggaatcaacatttgaacgtattaaagaactgtcatctgaccgaactctttatgaccgtgagcgagaaaaagcatatgaatttttgtatcagcaccaagattcaagcttctgctttaaagaacagtttgacattattacaaaataaagggcttcggccctttagctttatacggagtttgatataatgatatttcttggatatgtgatactttttcttgcattttatctattcactagagcatgttggattgggttctttagcacgccagatgggtttatttcaataattttattttgcatttcaatgacggttcttgatatatgaaaattttaaatttaggtgattggcatttaggcgttaaagctgatgatgagtgggttcaatccattcagttggatggaattaaacaagcaatagaatattctaagaaaaatggaattactacctggattcaatatggcgatatttttgatgtgcgaaaagcaatcacgcataaaactatggagttcgctcgtgaaatagttcaaatgcttgatgatgctggtattaccctacatactgttgtaggaaaccatgatatgcactttaaaaatactttaactccaaatgcctctactgagcttttggctaaatatcctaatgttaaagtatatgataagcctactacagtagattttgacggatgtttaattgatttaattccttggatgtgtgaagaaaatactggtgaaattctcgagcacataaaaacttcttctgcttctttttgtgttggtcactgggaactgaatggattttatttttataaaggaatgaaatctcacggtcttgaacctgatttccttaagacttataaagaagtgtggtctggtcacttccatactatttctgaggctgcaaacgtcaaatatattgggacaccatggacactaactgcaggtgacgagaatgaccctcgtgggttctggatgtttgatacagaaacagaacgaatggaatttattccaaacaacactacctggcatcgtagaattcattatccatttaaaggaaaaattgactataaagattttacaaatctatcagtacgtgttatagtaactgaggtagacaaaaatctgacgaagttcgaatctgaactagaaaaagttgtgcattcattacgagttgtgtcaaagattgataactctgtcgagtcagatgacagtgaagaagttgaagttcaatctcttcagacgttaatggaagaatacattaatgcaattccagacatcactgattctgatcgtgaagcacttattcaatatgcaaatcagttatatgtagaggcaacgcaatgacttttgatgaatttaaaaatgttatgatgagtcagcattttgaatgcgaagtaaaagatgatattggtcataaagaaattattgaatattggtttgaaccgttagaggttgaagataattgtattaaaaaggttacagtctgcactgactgggctgtatcttttaacttcaacattttagataatgacacacctaaatcattacaagatatggctgtatcttgtattaaggatgcatactgtgaagttttcgacatttgacattaatgatgaattcatagcaaatattgattataccgaagaagattctagatatgttggaataatttatattacatcaaaaacagcacaaggtgttgtttgcatggctgaatttgatgaatactttttagattatgatgatatgatagaatggtctaaaagatacattaaaaggaatcttttgtgaagaattttaaacttgacattaatgatgaatttttaataaaggaattagttgaaaaattagcgttgagtgaagaagacgccaagtcttacattaattttatttctgtgaattcaactgttaaaactccaggtaaaacggaagcacaccacgtgcttcctaaatcaatatttcctgaatatttaaaatctacatggaatttagttaatttaagtcattttaatcattttaaagcacacttcttattagcaaaaggtaaaaatggaaaaatgctaaatgctttaaatagaatgatgtcaggaaaaacatataaaaatttatctttagccgaagttgatttaatagctgctgaatatagttttataaaacaagatgtaagtgacacaatatcaaaaaggcttcaacagtattattcaaatccgcaaaatagaaatgctgctagagaaagggcattaaaatatttttcagtagcaaaaaataggaaagataataaagaaagattaaataattttaaaacaaaacaaaaaatttcaatggcttcaaggggatggtttaataacgaagaaaataaaattaaacaccaaaaggctgttcgtgctgctttatcaaaacctgaatataaaatagctatatcaaattcagtagctgctagttggaaaaatccggagattagaaaagctcatatagcatctcgacgaaaaggatatcattgggataataaagacaaattgtatgaattgtggatatcatataatcgtcctaaacatgtaatgtttaggaaaatgttagttaagaatggatatccaatagaggcttcattacaggctttagttaaagaattttcttcattgtgaacaattggatacaaaatgaaatcatttaaacttaatagagtaaaatataaaaatataatgtcagttggtcaaaatggagttgacattcaattagataaggttcaaaaaactcttattactggacgaaatggcggtggtaagtctactatgttagaagccatcacatttgggctttttggcaagccatttcgtgatgtaaagaaaggtcaattaataaacagcacaaataagaaagaacttttagttgaactgtggatggaatatgatgagaaaaagtactatatcaaaagaggacaaaaaccaaacgttttcgaaatcaccgttaacggtacacgtcttaatgaatctgccagcagtaaagatttccaagcagaatttgaacagcttatcggaatgtcatatgccagtttcaagcagattgttgtccttggtacagcagggtatacccctttcatgggtttgtcgacccctgcgcgaagaaagcttgtggaagacctgcttgaggtaggaacattagctgaaatggataagcttaataaagcactaatacgtgaattaaattcacaaaaccaagtgcttgatgttaaaaaagatagtattatccaacaaattaaaatatataatgataacgttgaacgccagaaaaaattaactggtgataaccttactcgtctgcagaatatgtatgatgatttggcgaaagaagctaaaacgttaaaatcggaaatagaagaagctaatgaaagattagttaatattgttttagatgaagacccgactgatgcatttaataaaatcggtcaagaagcatttttaattaaatcaaaaattgactcgtataataaagtcattaatatgtatcacgaaggtggattatgtccaacctgtttgtcacaattaagttccggtgataaagttgtttctaaaattaaagataaagtttctgaatgtacgcattcgtttgaacagctttcaacacatcgtgataatttaaaagttcttgttgatgaataccgagataatattaaaactcagcagtcgttggcaaatgatattcgcaataaaaagcaatctctaatcacgacagtagataaagctaaaaaggttaaagcggctatagaaaaagcatcttctgagtttattgaccatgctgatgaaatagcactgcttcaagaagaacttgataaaattgttaagacaaaaactaatttagtaatggaaaaataccacagaggaattttgactgatatgctcaaagattctggtattaaaggtgctattattaaaaagtacattccattatttaataagcagattaaccattatcttaaaataatggaagcggattatgtgtttacattagatgaagaatttaatgagacaattaaatcccgtggtcgtgaagattttagttatgcttcattcagtcaaggtgaaaaagcgcgaattgatattgctcttttatttacttggcgtgatattgctgaaaaagtttcaggtgttaaaataaacacactaattcttgatgaagtttttgattcagcgaccgacgttgaaggtgtaaaagctatttcaactattttagatagtttaaaaaatactaatgtttttgttatttcgcatagagaccatgacccacaagtatatggtcagcatcttcaaatgaagaaagttggtcgatttactgtaatggtttaatttataagagattatgctttaatttattagagtataatctctatggaggaaaaacatggaatattcaactggacagcatttattaacttttcctgaaataaaacgatatattctgagaaataatttttctaatgaagagcatatagttactgaatctatgcttaggaatgcatttaaagcagaatatacaaaaataatgtccaatagaaatgaagcttggactgttactgattattatgactaaaggtgtattatgactaaaattactgtgaattatactgttgatgtaaaagatattcagccaaaacacgtgcgttctgaatcaaatccacaaaaccaaaataaaattcgtcgagcatgggttttgtctctttctgataacgcaatggaagttattcagaacaaaattaaatctgcacctgctcgtcatgcgtattatgaagctatcgatcgtgaagtaagtaataaatggattgaactaatgcgcaaacatactgcagaatccctaaacgccggtgctaaatttattatgacttcatgtggtgaacgccttgaagatgattattgtggtaatgcagatgaacgtctaattgttgctgctcaaattgttgcggaaacaattgcggctgattttaatcgttaattgctttattaaattagttataaaattaaatctcatttgaattgaaggaaattacatgaaactgtctaaagatactactgctctgcttaaaaatttcgctactattaactccggtattatgcttaaatccggtcaatttattatgactcgcgcggttaatggtacaacttatgcagaagcaaatatttctgacactattgattttgatgtagcgatttacgatttgaacggttttctcggtattctgtctctagttaatgacgatgcagaaatttcccagtcagaagatggaaatattaaaattgctgatgctcgttcaacaattttttggccagcagccgatccgagtacagtagttgctcctaataaaccaattccattcccggtagcatctgttgttactgaaattaaagctgaagaccttcaacagctgttgcgtgtatctcgcggtctgcagattgatacaattgctatcacagtaaaagaaggtaaaatcgtaattaacggttttaataaagtagaagattctgctttgactcgtgttaaatattctttgactcttggtgattatgatggtgaaaatacatttaatttcattatcaatatggcaaatatgaaaatgcaaccaggaaattataaacttctgctctgggcaaaaggtaaacaaggtgctgctaaatttgaaggtgaacatgcgaattatgtagtagctcttgaagctgattctacccacgatttttaatagagggcttcggccctttataatttacactaaaacttgaatgaggaaattatgattactgtaaatgaaaaagaacacattcttgaacagaaatatcgtccatctactatcgatgaatgtattcttcccgcctttgataaagaaacctttaaatctattacaagtaaaggtaagattccacatattattcttcattctccttctccaggaacaggtaaaacaactgtagcaaaagcattgtgtcatgatgtaaatgctgatatgatgtttgtaaatggatcagactgtaaaattgatttcgttcgtggtcctttaaccaattttgcgagtgcagcttcatttgatggtcgtcaaaaggtaattgttattgatgaatttgaccgctcaggtttagcagaatctcagcgacatcttcgttcctttatggaagcttacagctcaaactgtagtattattattactgctaacaatattgatggtattattaaaccgcttcagtcacgctgccgagttatcacattcggtcaaccgaccgatgaagataaaattgaaatgatgaagcagatgattcgtcgattgactgaaatctgtaaacatgaaggaattgctatagctgatatgaaagttgtagcagctttggttaaaaagaattttcctgattttcgtaaaactattggcgagctcgatagttattcatctaaaggtgttttggatgctggtattttatcactggttactaacgatcgtggtgctattgatgatgttcttgagtctctcaaaaataaagatgttaaacaactcagagctttagcaccaaaatatgcagctgattattcgtggttcgtaggtaaacttgccgaagaaatctattcacgtgtaactccacagagtattattcgtatgtacgaaattgtcggcgaaaataatcagtatcatggtattgcagctaatactgaattgcatttagcatatcttttcattcaattggcatgcgaaatgcagtggaagtgatatgagcttatttgaagatgatattcaattaaacgagcatcaagttgcttggtattcaaaagattggacagctgtccaatctgctgctgattcttttaaagaaaaagctgaaaatgaattttttgaaataattggagctattaataataaaactaattgctctattgctcaaaaagattattcaaaatacatggttgagaatgcattatcacaatttcctgagtgcatgccagctgtatatgctatgaatttaattggatcaggtttaagcgatgaagcccattttaattatctgatggctgctgttcctcgtggtaaaagatatggtaaatgggcaaaactggttgaagattctaccgaagtattgattattaagttacttgctaagcggtatcaagttaatacaaatgatgcaattaactataaatcaattcttactaaaaatggaaaacttcctttagtattaaaagaactaaaaggtttagtcacggatgattttttgaaagaagtgactaagaacgtaaaagaacagaaacaactcaaaaaactagcattggaatggtaaaatgattgaaattactcttaaaaaacctgaagattttctgaaagtaaaagaaactttgactcgtatgggaattgctaataataaagataaagttctgtatcagtcctgtcatattcttcagaaaaaaggactatactatatcgttcattttaaagaaatgcttcgtatggatggtcgccaagttgaaatgacagaagaagatgaagttcgtcgtgattcgattgcatggctattagaagattggggactgattgaaatcgttcctggtcaaagaacttttatgaaagatttaactaataacttccgagttatttcttttaaacaaaaacatgaatggaaactcgttcctaaatatacgattggtaattaagcaaggggcttcggccccttatttggagtataatatatcaagagcctaataactcgggctataaactaaggaatatctatgaaagaattttatatctctatcgaaacagttggaaataacattgttgaacgttatattgatgaaaacggaaaggaacgtactcgtgaagtagaatatcttccgactatgtttaggcattgtaaggaagagtcaaaatacaaagacatctatggtaaaaactgcgctcctcaaaaatttccatcaatgaaagatgctcgagattggatgaagcgaatggaagacatcggtctcgaagctctcggtatgaacgattttaaactcgcttatatcagtgatacatatggttcagaaattgtttatgaccgaaaatttgttcgtgtagctaactgtgacattgaggttactggtgataaatttcctgacccaatgaaagcagaatatgaaattgatgctatcactcattatgattcaattgacgaccgtttttacgtctttgatttgttgaattcaatgtacggttcagtatcaaaatgggatgcaaagttagctgctaaacttgactgtgaaggtggtgatgaagttcctcaagaaattcttgaccgagtaatttatatgccatttgataatgagcgtgatatgctcatggaatatattaatctctgggaacagaaacgacctgctatttttactggttggaatattgagggatttgacgttccgtatatcatgaatcgcgttaaaatggttctcggcgaacgcagtatgaaacgtttctctccaatcggtcgggtaaaatctaaactaattcaaaatgtgtacggtagcaaagaaatttattctattgatggcgtatctattcttgattatttagatttgtataagaaattcgcatttactaatttgccgtcattctctttggaatcagttgctcagcatgaaaccaaaaaaggtaaattaccatacgacggtcctattaataaacttcgtgagactaatcatcaacgatacattagttataacatcattgacgtagaatcagttcaagcaattgataaaattcgcgggtttatcgatctagttttaagtatgtcttattacgctaaaatgcctttttccggtgtaatgagtcctattaaaacttgggatgctattatttttaactcattgaaaggtgaacataaggttattcctcaacaaggttcgcatgttaaacagagttttccgggtgcatttgtgtttgaacctaaaccaattgctcgtcgatatattatgagttttgacttgacgtctctgtatccgagcattattcgtcaggttaacattagtcctgagactattcgtggacagttcaaagttcatccaattcatgaatatatcgcaggaacagctcctaagccaagtgatgaatattcttgttctcctaatggatggatgtatgataagcatcaagaaggtatcattccaaaggaaatcgctaaagtatttttccaacgtaaagattggaaaaagaaaatgttcgccgaagaaatgaatgccgaagctattaaaaagattattatgaaaggcgcagggtcttgttcaactaaacctgaagttgaacgatatgttaagttcagtgatgatttcttaaatgaactatcgaattatactgaatctgttctcaatagtttgattgaagaatgtgaaaaagcggctacacttgctaatacaaatcagctgaaccgtaaaattcttattaacagtctttatggtgctcttggtaatattcatttccgttactatgatttgcgaaatgctactgctatcacaattttcggccaagttggtattcagtggattgctcgtaaaattaatgaatatctgaataaagtgtgtggaactgatggcgaagatttcatcgcagcaggtgatactgattcggtatatgtttgtgtagataaagttattgaaaaagttggtcttgaccgattcaaagagcagaacgatttagttgaattcatgaatcagttcggtaagaaaaagatggaacctatgattgatgttgcatatcgtgagttatgtgattatatgaataaccgcgagcatctgatgcatatggaccgtgaagctatttcttgccctccgcttggttcaaagggtgttggtggattttggaaagcgaaaaagcgttatgctctgaacgtttatgatatggaagataagcgttttgctgaaccacatctaaaaatcatgggtatggaaactcagcagagttcaacgcctaaagcggttcaagaagctctcgaagaaagtattcgtcgtattcttcaggaaggtgaagagtctgtccaagaatattacaagaacttcgagaaagaatatcgtcaacttgactataaagttattgctgaagtaaaaactgcgaacgatatagcgaaatatgatgataaaggttggccaggatttaaatgcccgttccatattcgtggtgtgctaacttatcgtcgagctgttagcggtttaggtgtagctccaattttggatggaaataaggtaatggttcttccattacgtgaaggaaatccatttggtgacaagtgcattgcttggccatcaggcacagaacttccaaaagaaattcgttctgacgtactgtcttggattgactactcaactttgttccaaaaatcgtttgttaaaccacttgcgggtatgtgtgaatcggcaggtatggactatgaggaaaaagcttcgttagacttcctgtttggctgatagaataaatctagggacctccgggtccctttttcatacaagtaatataaatctatacttatgaaaaagagatgattctggaccctttggattccctaaaaattttttcacaaaactgtttacatccctgttcttctatggtactatacaactatcaactactgatacggatttggagaatgaaatgaaaatcgctattttggttattgcattaggtcttgctggttgtgtagctcaaggaccggtagtaaatcagtctgatgtaggaaaaattgtaaactgttcaagcaaattttataatcctaatgtcaagtgttataaagaagctccaaaacagacagtagaacaaatgcaggcgaattttgacgaagctattcgtccagatgaatctgctcaagcatatcgtaattcggatgtaattacacgcgaagaaaaaattgaaagttactgtgccaaactttgggctaattgggctaataattatcaatggcgtactggtaaaaatgctccgatggagtatgtagtaaattcttataattcatgcgtaaaaaatttgactaagtgaggaaaacatggaaactttagtagcaggttcaatttttatggttttagtttcaggtgtgttggctattattatatacatgctcccatggttcatcgccttgatgcgtgggtcaaaatcgacagtaggaatcttttttacatctttactgtttaactggtcaatcattggttggtttattacatttatttggtcaattgcgggtgaaaccaaaaagtctgcacagccaaatcaagtaattatcatcagagagaaggaatgaaaagcaaaattatagcagtgttgcttttaatcttgatgattataataagtatatactatagtgtaacggttcctcttatgattccaactattattttaggttggggtttattactgttacaagttaaatatgaatgtatcaattgaggtttaaatgattaatgactctttgacagttgaagaaactcgtcttcatttgggaattgcgttaaaggaaaaagatttcgtaattgataaaaccggtgttaaaactattgaaattattggcgcatcatttgtagcagatgaaccgtttatttttggcgctcttaatgatgaatacattcagcgtgaacttgaatggtataaatctaagagcttgtttgttaaagatattccaggtgaaacaccaaagatttggcagcaggtagcatcttctaaaggcgaaattaactcgaattatggttgggccatctggtcagaagataactatgctcagtatgacatgtgtttagctgaacttggtcaaaatcctgattctcgacgtggtatcatgatttatactcgtccatccatgcagtttgactacaataaagatggtatgtcagatttcatgtgtacgaatacagtacagtatctgattcgtgataagaaagtcaatgcagtagttaacatgcgctcaaatgacgtggtcttcggattccgcaatgattatgcgtggcaaaaatacgtactagataaattagtatctgatttgaatgcaggtgattcaactcgccagtataaagcgggttctattatatggaatgtcggaagtcttcatgtgtattcccgtcatttttacttggttgaccattggtggaaaactggcgaaactcatattgcgaaaaaagattataacggtgagtggaaatgattcaattcgtaattccaagctatcaacgtgtaggggcagtttctgcccttgatatgtttccgactgattatgaaccccatattgtagtgcgtgaacacgaagaaaaagcttattatgatgcctatgggtctagagctaaaattgtaactattcctgatgatgttaatggaattgccggtactcgtaaagcaattactgatatgtatgcaggtcaacgaatctggatgattgacgatgatactactatccgtatgagttcaatacgaaagagagacgataaacggcgcgtagataaaattaatcaattaactcgtgaacagttctatgaattgattcaatacgtcgaagatgccatggattgcgggtattatcatggccatgctcgtctacctatttttaaaattacttcatcttggggtaattatcgtgaaaattcatatggattcacgaatacatggtatgacctcggaaaacttacgacagaacaaattgggtatggaaaaattgatttatgcgaagatatgtatgcatttctcaatttaattaatcaaggttatccgcatttggccttgttcaaatatctggttgtatctggaaaagcacaagctcctggcgggtgcagttcaattcgtagtaattctaaacataatagagcgcttgagcaaatcaatagagagtttccagagcaagctcgttggaaaacttctaatatcgaaaaacgaaaatcgttgggtgaagaagacgagccattaaaggttcttcgcatgcgtgtttcgcgcaaagaaaaatcagaagcatttcataagtttaatgctattcatccgatagcagttgattaatgcctaaatttattgtgttataattactctatctttaaccagtgaggaaaatataatgatgcctatggaaaaaatgaatgtctattgcagatttaaaatcccgtttgattaaagcttccacttctaaaatgactgctgaactgactacatctaaattctttaatgaaaaggatgtaattcgtacaaaaattccaatgcttaatatcgctatttccggtgcgattgatggtggaatgcagtccggtttaactattttcgcaggtccttctaaacactttaaatcaaatatgtctttgactatggttgcggcgtatttgaacaaatatcctgacgcagtttgtttattctatgatagcgaatttggtattactccagcttatttgcgatccatgggagttgacccggaacgagtaattcatacgccaattcagtcagttgaacaactgaaaattgatatggtgaatcagcttgaagctattgagcgcggtgaaaaagttattgtattcatcgactcaatcggtaatatggcttctaagaaagaaacggaagatgccttgaatgaaaaatctgtggcagatatgactcgtgctaaatcactgaagtcattattccgtattgttactccttattttagtattaaaaacattccatgcgttgcggttaaccatacaattgaaacaattgaaatgtttagtaaaaccgtgatgacaggtggtacaggcgtaatgtattcggctgatactgtgttcattatcggtaagcgtcagattaaagatggttctgatcttcaagggtatcaatttgttctaaatgtagaaaaatctcgtaccgttaaagaaaaaagtaaattctttattgatgttaaatttgacggtggtatcgatccttattctggattgttagatatggctcttgaattaggatttgtagtaaaacctaaaaatggctggtatgctcgtgaatttcttgatgaagaaaccggcgagatgattcgcgaagaaaaatcttggcgcgcaaaagataccaattgcactacattctggggtcctttatttaaacatcagccattccgagatgctattaaacgtgcttatcaattaggtgctattgatagtaatgaaattgttgaagctgaagttgatgaattaattaactcaaaggttgaaaaatttaaatctccagaaagtaaaagtaaatcagcagctgatttagaaactgacctagatcagttaagtgatatggaagaatttaatgaataaagatgatttagatttagaaattatcgacgaatccccctcttcggagggggaagaagaaagaaaagaacgtctttttaatgaatcccttaagataattaaatctgccatggaaaatgttatccaggagattgtcattaaactagaagatggttctacacacattgtgtatgtgacaaaattagattgggttgatggaaaagtcgtaatggactttgctgttcttgaccaagaaagaaaagctgagttagctcctcatgtagaaaagtgtattacaatgcaactacaagatgcatttaataaaaggtcaaagaaaaaatttaaattcttttaaggagtaagtgtggtagaaattattctttctcatctcatatttgatcaagcttatttttcaaaagtttggccatatatggattcagaatattttgaaagtggtccagctaaaaatacattcaaattaattaaatctcatgttaacgagtaccatagcgttccatctattaatgcgttaaatgttgcattagaaaatagttcatttactgaaacagaatattctggtgtaaaaacacttatttcgaaactaaccgattctccagaagaccacagctggttagtaaaagaaacagaaaaatatgttcagcaaagggcgatgtttaacgccacatctaaaataattgaaattcaaactaatgctgagcttcctccagaaaaacgaaataagaaaatgccagatgtaggtgctattcctgacatcatgcgccaagcattatcaatttcatttgatagctacgttggccatgattggatggatgactacgaagcacgttggctatcttatatgaataaagctcgtaaggttccatttaaactcaaaattctaaataaaattactaaaggcggagctgagactggaacactgaacgttttaatggctggtgttaacgttggtaaatcattaggattgtgttcattggcagcagattatttgcagctcggacataatgttctttacatttcaatggaaatggcagaagaagtctgtgctaaacgtattgacgctaatatgctcgatgtttctcttgatgacattgatgatgggcatatttcttacgctgaatataaaggaaaaatggaaaaatggcgtgagaaatctactcttggccgtttaatcgttaaacagtatcctactggtggagcagacgctaatacatttcgatcgcttttaaacgaattaaagctcaagaagaattttgttccaacaatcattattgttgactatctaggtatttgtaaatcttgccgcatcagagtttattcagaaaatagttacacaactgttaaagctatcgcagaggaattgcgtgctctggcggttgaaaccgaaactgttctttggactgcagcacaggttggtaagcaagcttgggattcttctgatgttaacatgagcgatattgcagaatctgccggtcttccagcaacagccgattttatgcttgcggtcattgaaaccgaggagttagcagctgctgaacagcaactcattaagcaaatcaaatcacgatatggtgataagaataaatggaataagtttttgatgggggttcaaaaaggaaatcaaaaatgggtagaaattgagcaagattctactccaaccgaagtgaacgaagtagcaggttcgcagcagattcaggctgagcagaatcgctatcaaagaaacgaatctactcgagcccagttagatgctttggcaaatgaattaaaattttagtttacaagctgacaagactatggtatagtagtcttgttggttaaatgaggagattgttatggaattggtaaaggtagtttttatggggtggtttaagaatgaaagcatgtttactaaagaaatcacaatgatgaaagacgacgttcaatgggctactactcaatatgctgaagttaataaagcattagttaaagctttcattgatgacaagaaagtatgcgaagtggattgccgaggataatatgcacattgttttatttaaacctactccgtataatgtcaggaaaaatactcaattcaaagcacttgttgcagatacgtgggaattggtgttagatattccagcagaagaaagccctccatttggtcgagtggaatttattaagtttgctgtgcgccctacgaagcgacagattcgccaatgcaaaagatactttcgtaaaatcgtcaagttagagaaatagttattgatgctagtaaaatagtagtttacaagctgatagagttgtgttatagtaattctatcagctaatcgcggagaaaagaaaatgatgctagttaatagagaatatcagtttaaatcagaagaagatttggaaaaattcgcaagtggttgtgaactgaatagacgcacagctaaagtcataggattaaaaccctttacagttctagattgtgaagtttctaaattccgcagagggtgttctattagcggtcatgctctggttgatgggaacacatttttctttgtttttagcgtcagagaacttttattgattaacgaacttgaggaaataaaatagtttacttttgttggaaattgagatactattataaacataaactactgaggagattatcatgaaaaaatttgtttttgctgcaatttttgctttggcttcttgtactgctcagcctgctatggcaggttatgataaagatttgtgtgagtggtctatgactgcagatcagactgaggttgaaactcaaattgaagcggatattatgaatatcgttgagcgtgatcgccctgaaatgaaagctgaagtacaaaaacagcttaagtctggtggtgtaatgcagtataattacgttctgtattgtgataaaaacttcaataataaaaatatcatcgctgaagtggtaggtgaataattagaggctaatatgaaaacgtttaaagaatttattaaagaagatatggtagctggagattcaggtggtaatcctgaaaatatctctactggaacaacgtcaggtgctgtagtaaataaaggtcctgaacagattcctaaaaagaaaaaagaggaatctaaagaaaaagaagagtaaaaatgtcatcaataccttggattgataatgagtttgcataccgtgcattggctcatttacctaaattcgcgcaagtaaataatagttcaacttttaaattacggtttagatgtcccgtttgtggagattcaaaaaccgatcaaaataaagcccgtggatggtattatggcgataataatgaaggaaatattcattgttataactgcaactatcatgcaccaatcggaatatatttaaaggagtttgaacctgatttatatcgtgagtatatctttgaaataagaaaagaaaaaggtaaaagtcgtccagtagaaaaacctaaagaacttcctaaacaacctgagaagaaaataattaaatctcttccgtcatgcattagattagataaactggcggaagaccatccaattataaaatacgtaaaagctcgttgtattccaaaggacaaatggaaatatctttggtttacaaccgaatggcctaaattagttaatagcatagcaccgggaacatataaaaaggaaatacctgagcctcgtcttgttattccaatttataatgctaatggaaaagctgagtcttttcaaggacgtgcattaaagaaagatgctcctcaaaaatatatcaccatcaaagcttatcctgaggcaacaaaaatatatggagtcgaacgagttaaaaatggtgatgtatatgttctagaaggacctatagattcactttttattgaaaatggtatagctattacgggtggtcaattagacctagaagttgttccatttaaagatagacgagtgtgggtcttagataatgaacctcgtcaccctgacactattaaacgaatgactaaattagttgatgcaggagaaagggttatgttttgggataaatctccctggaaatcaaaagatgttaatgatatgattagaaaggaaggtgcaacccctgaacaaattatggaatatatgaaaaataatattgcccaggggttaatggctaaaatgcggctatctaaatatgctaagatttaaattaacccaactaaagcaaatgctaaatctacgaatgtatcaagagtaactactggaatactaacgccatgagcaatagcaactggcgataaaacaaaattccaaagtaaaattcctatcatagcagaaatagtaaaagctatacgttttttattaccttttatggcattaacaagtgccattaatttttgtaccatatgtcctccttattgctttatatatttattgtataattaatctactaacccatgaattgaaaggaaaaataatggcttactttaatgaatgttcgcaactgatcgaaggcgctgataaagctcaaaatgaatactgggatattctcggtgatgaaaaagacccactgcaagttatgcttgatatgcagaaatctttgcaggttcgtttagcaaatgaccgcgaatactgctaccatccagataaattagaaactgccggtgatgttgtttcttggatgcgtgaacaaaaagactgtattgatgatgaattccgcgaacttctgacttctcttggtgaaatgtcacgtggtgaaaaagatgcatccgcagtttggaaaaaatggaaagcacgttatattgaagcgcaagaaaaacgcattgatgaaatgtccccagaagatcagcttgaaattaaatttgagcttgtggatatatttcatttcgtattaaatatgtttgctggccttggaatgaatgcggaagaaatctttaaactttattatttgaaaaataaacataattttgaacgtcaagataatgggtattaaacaaaaattttatagaacatatatagtaaaagttaggacgccgaaaggcgtcttttggtacgctgggaaacatgaatcatttattgtaaatccatatgatgataaatatccgggttcaggcaaaatattatggaacatatatcgtaagtatggttttaattataaaatacgttggtcaaaatgccatggttctagagaaaaatcatatgaagttgaacgcgagctaatatctgcattaaaacgtaaacacccagatacttgcattaatatttctcctggtggtcagggtggagaaggaagaaaatggactgagcaacaacgattagaacataaacttagattaaacaaccctgaaacaaaaactcggatgaagaattcacaacgtatagcccaaaatagagcagaacgaaaagctcggcaatctgaagtaatgaaaaagttttattcgaatggcggaaataaaaagatttcagaaggaacttcaagggcgcaaagaaaagcaccgcattggcatgaaccgcttaaaagcgaaatacacgagttatgggtttctttaggtaaaccagcaacaggcccggttgtaaaggcgcttaaaggaaaatatgatgtaacaagttcagctcttaagaatttaatttacttattcagaaaagaagatgtataaataatcatgtaatttaaataaaaggagaattacatggctagtactcgcggttatgttaatatcaaaacgtttgagcagaaattagatggaaataagaaaattgaaggaaaggaaatttctgtagctttccctctttattctgacgttcacaaaatttctggtgctcattaccagatattcccttcagaaaaagcagcatatactactgtatacgaagaaaatcaacgtgatgcatggattgctgcaaacgaagatctgtggaaagtaactggtggttaataattcaaggactccttcgggagtccttttttcattttaccagtttactttccaaaatgagtatggtataatagaattatcttatagaggagagcactatgttaaatcgttggattaaaccaaatgaagatttagatattatcatttcacggcatgtaatgaagaaatatgaactacagccatggtctacagaagttgttgtgcattcatttatgatgtacgcagatggttctgtcgaatttaatgcagagattcgatatgattatggcgagaagcaagttgaattcaaaagaggctttttgtaatgtttatctttaactggtttaaaagtttctttacggatttttctctacagctcctggagaaggtgtagttcctatttcaaatgactaccttcctttaactgtagttgaatatgtttatatgggagatggaacagtagaagcagttactatgacttatgaagaagcccaagaatattataaaaatccttggcgctggtcaacacctactgcatcatctaatacacagaatacacagtctagttctgattcatatgacactaatgttcctgttcatgtatggacgggcgattcgtgtggaagttcttgtgattctagttgttcatctacatcttgtgattgaggaaaattatggaagcgattttgtttgaaatgtatattagcagtaatagtatgtcgtttgctaaagatgttccaattacagtagcagtaatgattgataagggttattgtgacccaatgtatctcgtagaaaatttcgtttcaatgccagttccagaagatgctgaaataaaacttaaaaagattggtatcattgaaactgtaccaaatattccgtttagagcaattgaagcatttactaaatccgaatacattaatgttagcgcagaacaatataatgataatcctttatctttttattcgtacgaatcactatatagctggaaaatagataaaggaaataaatttataattgtgagtgaagatgctttatcatactttatttcttctgtatggaatagtttacatccaaatttgctaaaaattcatgaatttgatgatgctcctactgttgttttaggtaaaacaaatgaaagttctgaagaaaatgtttgaatggttcagtagaccaaactcaatgtacattgatgatggttgggttgaacaggcaaataaagaaatgcagaacgaatcagaagaatggatgaaatcaatgattagcgttgagaaagaaaagaaattagaacgctcagcgcttaaattgatgagagacatctatggggataaatcatgaacagagatatgacgctagaagaggccaaggctaaagcaaatgaagcattggatttgcttcttaaaattggcagtaaaatgatggaagaaaatgagaaatatatccaggaaaacaaaattcctgacggcccattagtaggcaagaggaaatcacatgattgaagtagcaaaacattattcaatagaatttatgtctaaagaaggtaaatcagtaaatacacttgataaaaagtgctcattaattattcctttagcagaaaatccggatattttaattaaagatataaaagaaagaaaatatccagaaaatgttattctaattataaagcatactgaagatattttgcagaatactgattcaccgttttcttcttccgaagctttaactattaaaggctataaaagagctcatgaatatggtctttttgacctgtttgaagatgataacgttaaattagcacttaatttagcaggtcaaccttctaaaagtaaaacattcattattgaagatattaaagatataaatgcatttgttaagatggtctgggctcattttgatgttggactacgttggagaatgtccgaagaagaaagaaaaattattgaagctaatcgttattttggtttttatcgctaggaattaatatggatttatttgagatgttagaagataatcattctacgaatatccagaatgattctagtgattataagaaagagtaccgtatagtattacagaattatggaattgaagccccagatgctcttctagaagaactagcttcataccatcttgaccctccgccctgggctccctgggcaaaataattcaaaaagttgtttactttccttcctaacaatgatatgatagcttctgaagtatatggaggctatcatgattattaatctcgcagatgttgaacagttatctataaaagctgaaagtgtcgattttcaatatgatatgtataaaaaagtctgtgaaaaatttactgactttgagcagtcagttctttggcaatgtatggaagccaaaaagaatgaagctcttcatcagcagttgaataaaatcgttaaaaagcatttaactaaatcgccttatcagctatatcgtggtatatcaaaatcgacaaaagaactcattaaagatttacaagttggagaagtgttttcaacgaacagagtagattcatttactactagtttgcatacagcgtgttctttttcttatgctgaatatttcactgaaatagtacttcgcttaaaaactgataaagcttttaattactctgaccatatcagcgatattatactttcttctcctaatactgagtttaagtatacatatgaagatactgatggattagattcagagcgtactgataacttaatgatgattgtgcgtgaacaggaatggatgattccaattggaaagtatagaataacttctatttcaaaagaaaaattacacgattcatttggaacatttaaagtttatgatattgaggtagttgaatgaaatactcagtaatgcaactaaaagattttaaaataaaatcaatggatgcatcagtgcgtgcttctattcgtgaagaattactttctgaagggtttaatttatctgaaattgaacttttaattcattgtattactaataagccagatgaccatacttggttaaatgaaataatcaaatctcgtttggttccaaacgataaacctctttggagaggtgttccagtcgagactaagcaagtgttaaatcaaggaattgatattattacatttgataaagtagtatcagcttcatatgataaaaatatagctctacattttgcttccggtttagagtataacacacaggttatttttgaattcaaagctcctatggtattcaatttccaggagtatgctataaaagctctacgctgtaaagaatacaatccaaactttaagtttccggatagccatcgttatcgtaatatggaattagtttcagatgaacaagaagtaatgataccagctggaagtgtatttaaaattgcagatagatatgagtacaaaaagtattcaacatacactatctatactcttgattttgaaggatttaatctataatggaaggacttagattcattataccatgaaagttttaaagcatttttcataaagttgtttacaagttaaagtaaaaatgttatagtataagtagttaaccgtccgtaagatgtgagaaaaatatgaagctgtctaataatcaaattcgtaaaattaaacgtcgtttagagcatactcaggcatccgcaaaaagacgttctaaagattttaacttagacttcaattacattaagaacattttagatcaaaaagtttgtgcttactcgggagaaccttttgataatcgtattgaaggagagaaattatcattagaacgttttgataataacgttggatacattaaagggaatgttattgcagtaaagaaaaagtataatacatttcgttctgattatactttagaagagttgatcgaaaagcgtgatttgtttgctttgcgaattggtcgttcatctgcgaaaaaagttcataaactaaatttagatgaaaagaaatgggctaaaatcaaaaagacttataatcaaattaaagctatacagaaaaaacgtgaaaaccgaattgaacacatttctcagctttctaaatcaaaacaaacttctgacgttaagctaacgattatagcacttaaagctcgtattgatggttctcgtatagcagaaggcgctgaagttgttaaattgaacgttcttcttaaaggctcggattggaaaactgtgaaaaagttgtcagaagcagaaatgcaatatgatatgtgtgataaaattattcaaggtgtagagcggtatcaaaacttgtcttttattgataaacttaaactgaaaagaggatacccgctaaattgttcaatttttaaacttatccgaggataatatggtttatgtatacgcgatagtttaccgagacaaagacggatttacggcgccagttccgcttgatgaacatcgtcctgctgtattttttgaatggaatattgctgataaagtatttactactcttaaagagcagtatcgactagctttaggtaagggaattccaagattagttgagactccacgtaaattttggtttaataaaatagaagttaaacatgttaagcctgatgtagacacacaaagattatatcagcgaattttagatactgggcgtattgttagtattccaattgcagggactttccgatgacatttgatgatttgaccgaaggccagaaaaatgcctttaatattgttatgaaggctattaaagaaaagaaacatcatgtaactattaatggacctgctggtaccggtaagactactcttactaagttcatcattgaagctttaatatctacgggtgaaactggtattattttagcagctcctactcatgcagctaaaaagattctttcaaaactatcagggaaagaagcaagtactattcatagtattcttaaaattaacccagtaacatatgaagaaaatgttctttttgagcagaaggaagtaccagatttagctaaatgcagggtattaatctgcgacgaagtgtcaatgtatgatagaaagctatttaaaattctgctttcaactatcccgccgtggtgtactataattggaataggtgataataagcaaattagacctgttgacccaggagaaaacattgcttatatcagtccattctttacacataaagatttttatcagtgtgaactcactgaagttaaacgcagtaatgctcctattattgatgtagctactgatgttcgcaacggtaagtggatttatgataaagttgttgacggtcatggagtacgtggatttaccggtgataccgctttacgcgattttatggtaaattatttttcaatcgtcaaatctttagatgatttgtttgaaaatcgcgtaatggcatttacgaataaatctgttgacaagttaaatagcattattcgtaaaaagatttttgaaactgataaagattttattgtcggtgaaattattgtaatgcaggaaccattaattaaaacatataaaattgatggaaagcctgtgtcagaaattatttttaataacggacaattagttcgtattatagaagcagagtatacatcaacctttgttaaagctcgtggtgtttctggagaatatctaattcgtcattgggatttaacagtagaaacttacggcgatgatgaatattatcgtgaaaagattaaaataatttcatctgatgaagagcggtataagtttaacttatttttaggtaaaacggcagaaacttataaaaattggaacaaaggcggaaaagctccgtggagtgatttttgggatgctaaatcacagtttagtaaagtgaaagcacttcctgcatcaacattccataaagctcagggtatgtctgtagaccgtgctttcatctatacgccttgtattcattatgcagatgctgaattagctcaacaacttctttacgttggtgtaacacgtggtcgttatgatgtgttttatgtgtgaggctatatgattaacatcaattcaaaatatttaaatcgtctaatagatggtataaggaagcatactaataagcaagataatctcgatgttatggtaacaggagctgagctccttcataagctttatcttataagtgatactatattagcaattaaacgaattgaaaaacaatcatatcacagtaatacagatacggtaattacactagatgaaagtgtctgtaaattactaattaaatttgaggaagctattcgtggaaataactaaagaccagttttatctgcttcaagataaagtgagcgaaatttatgaaatagcttatagtaaaaatcgtagaaatgtaaaaattgaatcaggcaagttaatgcttcaattggaagaaattgaacgagatttgattgcgttagaattcttttgcggtgaagtgaaaactgtcacaatcagtgattatgctttaggtgaaattagccatctttataaggcggttattaatgattgaattaagtttgcatcagtttaaatctcttatgacaaatgttaaagctgtcattgaggaaaattctagtcctgaaaatattactattcgcgaaaaagctttaaagatagtatacagtcttgaagagatacaaaaagatattgaatctatggcaaaatttattgatgagcctattaataaagtttatatccaagattatactgtaggtcaaattcgcgatttagcaaggaaaatttaatgtttgattttattatagattttgaaacaatgggaagcggtgaaaaagcagctgttattgatttggctgtaattgcttttgaccctaatccagaagtcgttgaaacatttgatgaattagtttcacgtggcattaaaatcaaatttgatttaaaaagccaaaaaggacatcgtctttttactaaaagcactatcgaatggtggaagaatcaatctcctgaagctcgaaaaaatattgcgccatcagatgaagatgtaagcactatcgatggtattgcaaaatttaatgattacatcaatgcgcataatatcgatccttggaaatctcaaggctggtgccgtggaatgtcgtttgattttccaattttagtcgatctcattcgcgatattcaacgtcttaacggcgtttccgagaatgagcttgatacatttaagttagaaccttgtaaattttggaatcagcgtgatattcgtaccagaattgaagcacttctacttgttcgtgatatgacaacgtgtccccttccaaagggaactttagatggatttgttgcgcataattctattcatgactgtgcgaaagacatcctgatgatgaagtatgctttgcgatacgctatgggtcttgaagatgctccatcagaggaagagtgcgatcctctgtctcttccaacaaaacgataaaaagttgtttacttcctcggttagttgtggtattataacaccatagctactgaggataataaaatgaaaatttatcgtgttgaatcatcgtttagtattcttgattatgaagatgctataacaatacgtcgaaatctttgtgttcaaataacgccgtataggagtataatagattcatggagcgaagagtggctattacacgtaggttatgacagacctaattttatgcatcatagcgataataataaaagaattcctttaccacacgaagataaactattagttaaaaacgctaatatagtaattaatactaagttcaagaaagattatgttggagtagaatatcatattccaggatggtttataggtctttatcattttgctttcgctagtgaatatgatatgatgagatggttcacacgagaagagcgtgaagaattagcttctaaaggattttatcttgctgtatacgaagtgccagatgaccaagttatcattggcggacatcaagtaatgttccgtaaatcccatgctgaactcgtagattttattgaaatgagataattatgaaatttaattataatcctgaatacataccaaatccggtagctaaactgattgattttgatgttgtaagcacttatgtatgccctgttaaaccgctggaaattaaggaacctactatgactaccgctattgaaatcggcaaaacctacaaactggttgaacctaaaattaaaactaatgccttgatttccggtcataaaactctgactgatgtttttggcgaaggcgaatttattgttgaagaatttgccaaaagtgagtggtttgacaaatcttacgtcatccacggtcgccggttagataataacaaaataaagaaaaacctggtttatgaagatgagttcatcctgttccaagaagttgaagaacaagaccctaccgaccttctaactcatgcggtagctatcaagactccatttatttcggtctgtggttgggtaacagaccaatggattgaagatggtgttgaacttctgaacgttgttcatgcaggtgattttagcgtagtacctcgtagtgcagtggtagctattttgaattaatagtttacaaactcttgggaccagagtataatggtcccgcggagtataaaatctttttaacaagtgagaaataactatgattattaatattggtgaaattgctcgtgtatctgataaatcccgttctaaagcagcaggaaaattggtcgaaattgtaagcattcagcttaaacacggcgttaaagatgaagattctgaagtaaaagtgcgtatcattcctaaagatggaaagtctaaacctcagtttggttatgttcgcgcgaaatttcttgaatctgcgtttttgaaagctgttcctgctaaaggaattgaaacgattgatacttcacatgtaggtgtagactttaagtggaaacttggtcaagctatcaagttcattgctccttatgagtttgaatttaccgaaggtggacaaccacttcctcagcgtactcgcgctatgtgtgcatacattactgatcaatgggtagaagatggtgttaagctgtacaatgtggtatttttaggaacatacaaagtcattcctgaaagttggattaaacactacagcaaagctcgctatgcataaagtttaaaattttttcataaaactatatacatcagtagttgattatggtactatatcaatatcaactactgatacagaaaacaacttgaagaataaaatggataattcgttaaaggtgctgatactcttctgaaacgcatctctccaatgttcaattaatgaggaaattatgatgaaacgtaaaattgttcagaattgcactaatgatgaatttgaagatgtattattcgatccagatttggtagtagttcaaaaggaacatactagcaagtttactcacttgacttcggtttatgtgtatgagaaagtcggtgataaacaaccaatttacggtgtatttcgtgaaattactgaagatggcacaacttactggaaggaaatttattaatggctattaaatttgaagttaataaatggtatcaatttaaaaataaacaagctcaagaaaattttattaaagaccatactgataacggaatctatgcacgacgtttaggtatggagccttttaaaattttagatgctgattatcttgggcgtcctactaaaattatgacatctactggcacagttggatatgcaacacatggtgatatccttgacgaaaactttatctggctttctactaacgaagctgggttctttgatgaagtggaaaatccatatcaggcagttgaagagaaagagcaggaagagaaagagcaagaacaaatagaagatttcacagaattcccggtcatgaaagttactattgaaaataatgaacaggcatggtccttgtatcagatgttgaaagctcactttaaggaataattatgcctctttatgattataaatgtcaatccaaagactgtgcaaaagaatacgaaaaaatcaagaaaatttctgaaagggatactgatgtatgtcctgattgtcatcggattgctattcggttagtttctgctcctaagcatgtgaatggcggattttacgacttgcttaaagggtaattatgaaatatattaatcgttctatcgcagcattagtattagcagtgtctttaataggatgtactgatgctgataatgcaaccaaagttttgtcttcaagtggttttactaatattgaaatcactggatataattggttcggttgctctgaaaatgatttccaacatactggatttcgtgctattggacctactgggcagaaagtagaaggaacagtatgttctgggctgttctttaaggattcaactattcgttttaaataaaaggccttcgggcctttagctttatgattaccggagtataatattcccgaaaccaaacgaggataagtgatgattaagaatgaaattaaaattctgagcgatattgaacatatcaaaaagcgtagtggcatgtacattggctcttctgctaatgaaatgcatgagcgctttctgtttggtaaatgggaaagtgttcagtatgtacctggtcttgttaagcttattgatgaaattatcgataactcagtagatgaaggtattcgtactaagtttaaattcgcaaataaaattaatgttactattaaaaacaatcaagtaacagttgaagataacggtcgtggtattccgcaggcgatggttaaaacacctaccggtgaagaaattcctggtcctgttgctgcatggactattccaaaagcaggtggtaactttggtgatgataaagaacgtgtcactggcggtatgaatggtgttggttctagtttgacaaacattttttctgtgatgtttgtcggtgaaactggtgatggtcaaaataatattgtagttcgttgttcaaatggcatggaaaataaatcatgggaaactattcctggaaaatggaaaggaactcgtgttactttcattcctgattttatgtcatttgaaactaatgagctgtcacaagtttatcttgacattacactagatcgtctccagacacttgcagtagtttatcctgatattcaatttacctttaatggtaaaaaggttcagggcaattttaagaaatatgcacgccaatatgatgagcatgctattgttcaggaacaagaaaattgttctattgcggttggtcgttcaccggatggttttcgtcaattaacttatgtgaataacattcacactaagaatggtggccatcacattgactgtgttatggatgatatttgtgaagaccttattccacaaatcaaacgtaagtttaaaattgatgtaactaaagcacgtgttaaagaatgtttgactatcgttatgtttgttcgtgatatgaaaaacatgcgatttgattctcaaactaaagagcgtttgacttctccatttggcgaaattcgtagtcatattcagcttgatgctaaaaagatttcacgcgctattctaaataatgaagctattttgatgccaattattgaagctgccttggctcgtaaattggcagcagaaaaagcagcagaaactaaagcagctaaaaaggcttctaaagctaaagttcataaacatatcaaagcgaatctttgcggtaaagatgctgacactactcttttcttgactgagggtgattcggctattggatatcttattgatgttcgtgataaagaacttcatggtggttatccattacgtggtaaagttcttaacagttggggtatgtcatatgctgatatgcttaaaaacaaagaactgtttgatatttgcgcaatcactggattagttcttggtgaaaaggctgaaaacttaaattatcataatattgctattatgaccgatgctgaccatgatggtctaggaagcatttatccttctctgctcggattttttagtaattggccagaactgtttgaacaaggaagaattcgctttgtcaaaactcctgtaatcatcgctcaggtcggtaaaaaacaagaatggttttatacagtcgctgaatatgagagtgctaaagatgctctacctaaacatagcatccgttatattaaaggacttggctctttggaaaaatctgaatatcgtgagatgattcaaaatccagtatatgatgttgttaaacttcctgagaactggaaagagctttttgaaatgctcatgggagataatgctgaccttcgtaaagaatggatgagccagtagtttactttaccacaaggatgtggtataattaattgggcaaatgaggatattgaaatgaaatcatataaagtaaatttagaactttttgataaagcagttcatcgagaatatagaatcattcagcgctttttcgatatgggagaagccgaagagtttaaaaaccgctttaaggatattagagataaaattcaatccgacaccgcaactaaagatgaactactagaagttgctgaagttattaaacgcaatatgaattaatgaggaaattatgattatcaccactgaaaaagaaacaattcttggtaatggttctaaatcaaaagcatttagcatcacagcgtctcctaaagtatttaaaattctgtcatctgatttgtatacaaacaagattcgcgcagtagtccgtgaattgattaccaacatgattgatgcccatgctcttaatggaaatcctgaaaaatttatcatacaagttcctggacgtttagatccacgatttgtttgccgagattttggtccgggtatgagtgattttgatattcagggtgatgataattctcctggtttgtataattcatacttcagttcatctaaggctgaatctaacgatttcattggcggatttggtttaggttctaaatctccgtttagttatactgatacgtttagtattacttcataccataaaggtgaaattcgtggttatgtagcttacatggatggcgatggtccgcaaattaaacctacattcgtaaaagaaatgggtccagatgataaaactggtattgaaatcgtagttccagttgaagaaaaagactttagaaactttgcttatgaagtttcttatatcatgcgaccattcaaagatttggctatcattaatggtcttgaccgcgaaattgattattttccggattttgatgactattacggtgtaaatccagaaagatactggccagatcgtggtggattatatgctatctatggtggtattgtttatcctattgatggcgttattagagaccgtaactggttaagcattcgtaatgaagtgaattacattaagtttccaatgggttcacttgatattgctccatcgcgtgaggctctttcgctggatgatcgtactcgtaaaaatattattgaacgagttaaagaactcagtgagaaagcatttaatgaagatgtaaaacgatttaaagaatctacatctcctcgtcatacatatcgtgaattgatgaagatggggtattctgctcgagattatatgattagtaattcagtcaaattcacgactaaaaatctgtcatataagaagatgcagagcatgtttgaacctgacagtaagttatgcaatgcaggagttgtgtatgaagtaaatcttgaccctcgactgaaacgcattaagcaaagtcatgaaacttcagccgttgcatcaagttatcgtctgtttggcattaatacaacaaaaattaatattgttattgataatattaaaaatcgtgttaatattgtccgtggattagcacatgcgctagatgatagtgaatttaataacactttaaatattcatcacaatgagcgtcttctgtttattaatccggaagtagaatcgcagattgatttactacctgatattatggcaatgtttgaaagtgatgaagttaacattcattatttgtcagaaattgaagctttagttaaaagctatattccaaaggtagttaaaagtaaagctcctcgtcctaaagctgctacagcatttaagtttgaaattaaagatgggcgttgggaaaaagaggaattatttacacttacgtcagaagcagatgaaattactggttatgtagcgtatatgcatcgttctgatattttctctatggatggtactacatcactttgtcatccatctatgaatattttgattcgtatggctaatcttattggcattaatgaattttatgttattcgtccgcttttacagaaaaaggtaaaagaactcggtcagtgccaatgtatttttgaagctttgcgtgatttatatgtagatgcttttgatgatgtagattatgataagtatgtaggttattcaagttcagctcaacgatatattgataaaattatcaagtatcctgaactagattttatgatgaagtacttcagtacagatgaagtttctgaagaatatacacgacttggtaatatggttagttcattacgcggtgtatatttcaatggtggaaaagataccatcggtcatgatatctggacagtaactaatctctttgatgaattatcacgtaatgcttcaaaaaatagtgataaaatggttgctgagtttaccaagaaattccgtattgtttccgacttcatcggttatcgcaactctttaagtgatgatgaagtttcccaaatcgctaaaactatgaaggcccttgcggcttaataaggaaaattatgtacaatattaaatgcctgaccaaaaacgaacaagctgaaattgttaaactgtattcaagtggtaattacacccaacaggaattggctgattggcaaggtgtatcggttgacacaattcgtcgtgttttgaaaaatgctgaagaagctgagcgttccaaagttaccattagcggtgacattacagttgaagttaaaagtgatgtagctattgctccagttgctaaatctgacattatttggaatgcatctaaaaaattcatttcaattactgttgatggcgtaacttataacgcaactcctaatactcattcaaacttccaggaaattcttaatctgcttgttgaagataaattggaagaagcagcgcaaaaaattaatgttcgtcgcgctgttgaaaaatatatttccggcgatgttcgaattgaaggcggaagcttgttctatcaaaatatcgaattacggtctggtttagttgatcgtattctcgattcgatggaaaaaggtgaaaactttgaattttattttccgttcttggaaaatctgctggaaaacccaagccagaaagcggtatctcgactctttgatttcttggtagcaaacgatattgaaattacagaagacggttacttctatgcttggaaagtagttcgcagtaattactttgactgccattcaaatacttttgataacagtcctggtaaagtagttaaaatgccgcgtactcgtgtgaatgacgatgatacacaaacttgttctcgtggtctgcatgtgtgttctaaatcttatattcgtcactttggcagttcaaccagccgagttgtaaaagttaaagtacatccacgtgatgtagtatcaattccgattgattacaacgatgctaaaatgcgtacctgccaatacgaagtagttgaagacgttactgaacaatttaaataagggctttggcccttaactaaggaaaattatgttaggttatcaagcacgagtaaaagaagaatacgatcaattaatgctcaaaattaatgcactgggcaaatttttagaaagcacaaagtttctaacagttagtgcagttgagcaagaacttctactttcacagttcatctcaatgaaatcttacgcagagtgtttagaaaaaagaattgcacaattcaaataaaataaggggcttcggcccttttgttttaagggaaactatgatttattgtatgaatatcagtgattccgacgtaaaaggaaagtttaatgcagaaaacgaatccgggtttacagagactatttcagattccgacatttaccctatcgaacagtgacttgactagtgaaatgaaggtcaaaattgctgatacagcaagatactctttaaaacaaaatccaaatcaggataaggcagaagttatcgaaagatgccgtattgctgtgtacgcagagttttttgtagcagattggctgagcgggtatgttaacaaaggtcaagaagatgtcgatgatccgtacacatatgcatgggatgtattggcgcatccaagatactgcgggcttcgtgtagaagttaagacacatcaaactgactcacgttggatttcggtgacaacaggatgcagcggagagtatccatatggttctggaataaatctagggcccattctaaatcatcaagtcgctgactgtataattatattcaacactaaagaaattcatccaggtgtcatccaatacactccgaagttcatcggtgatagagaagaccttcgtaaggttgtaagaaaaagcaactacagcggatggtatctttccatttaaaaaatttcacaaaatggtttacataccacaaggaccgtggtactatacaactatcaactgatacggatttggagaataaaatgaaatttaaattttattacgctaaacataaaataactgatgagtttgtgtcagttgaatattctagcgatgatgaaggtatgatttatactcgcttgagactatcgcattgggagtctgatacgccttatttttcaactcccgaagaaattacacgcttagttaatggtcatatgaatgaccactggaatgtaattctttcagatagtcttaaagcggctattaatagtaatgaaatgaaaatcgctgagattgagctatgagttcactatggtggtgttttgtttggttaattagtattccattaatttgtttaacatttacttttgtgatgaggttattatgaaaatttttaattctgtacttattgcttgtgcgtggtgggttgcacaggtttcagcggtagtagttggtattcacatttattacgaatatttttaaaaaagttgtttacaaagactgttcttccgtggtactattaccctatcaactacggaggaacagaaaatgaaaaagattgttaaagctatatggaatgtagttataatactaatagttttgagtatattcccaatcgttttaatgattgatgtattaaacgtttactttggatttatgtgaggaaaatatgaagcgtaaacgcggtgcttttacatttattgaatggtttttcgataatatttttccggctttattcatttttatgctgattttcgccttaggttcagttgtagttggaatctatttgatgacagtagtcggaattgatattcatcaaaatggtttaaaatctgtggttgaaacaatttggaatggtgtaaaataatgaatttgctgagcggttggttttatattcttatgttttacattggtgcaaattttccatattggatgggatggtcaacaactgcatttggattttatactccttgaggtgaattatgaaaagttttaaagatgtaaaagttggtgaaattttctgtttagataacggtgatcagttaattcgtatttcacctcttaagagcactagcgagaaaccgacagttaacgctactttagcaaataacagtaatgaacgtttctgtattgaaaatgatactgaaacttataccgtagaagagttttgggaattgagcgtcgactgcgacgattaatttaatggccgcgtattcatgcggccttggagtagaaaataatttagaggaaattaatatgaaatatatgactgttactgatctaaataatgcaggcgctactgttattggtacaatcaagggcggtgagtggtttttgggaactccgcataaagacattttgtctaaacctggattttactttttagtgagtaaattagatggtcgtccatttagtaatccgtgcgtgtccgcacgattttatgtaggtaatcagcgttctaagcaagggttcagtgcagttctaagtcatattcgtcaacgtcggtctcagcttgcgcgtactattgcaaataacaatgttccatacacagtattttatttgcctgcttctaagatgaaacctctgacgacgggatttggaaaaggtcagttagctttagcgtttactcgtaatcatcattctgagtatcaaacacttgaagaaatgaaccgtatgttggctgataattttaaatttgttttgcaggcatattaatgagcaatttccataacgaacatgtgatgcagttctatcgtaacaatcttaaaactaaaggcgttttcggacgccagtgaggaaaatatgaatattgcgaaattattaggagttatttcatttatttgttggatagtagcatgtgttttaactatctgtatcgatgctagcagtgtgttttcacaagctttggcccagggtatgtgtgcatatttaacatttgtgttgctatctactaatgattaagaaaatcttgggctattcattagcccttgctactttattggtagcgctatattatggagtaatgttcggattaattcaagtcgtgcttttcatttctgatgttattatggcactacattcactagtatggtaaatttatgcaactgaataatcgcgatttaaaaagtatcattgataatgaagcactggcttatgctatgtacacggttgaaaatcgtgctatcccaaatatgattgatggatttaagccagttcaacgatttgttattgctcgagctcttgatttggcacgaggaaataaagataagtttcataaactcgcttctattgcaggtggtgtagcggaccttggatatcatcatggtgaaaactctgcacaagatgcgggggctttgatggctaacacttggaataataactttcctttgttagatggtcaaggaaactttggttctcgtaccgttcaaaaagcagcagcaagtcgttatatttttgctcgtgtaagtaaaaatttctataacgtatataaagatactgaatatgctccggtacatcaagataaagaacacattccgcctgctttctatttgcctattattcctactgttcttcttaatggcgtttccggtattgcaactggttatgcaacttacattcttcctcatagtgtttcttctgttaagaaagctgtattacaagctcttcaaggaaagaaagtaactaaaccgaaggtagaattcccagaatttcgtggtgaagtcgttgaaattgatggacaatatgaaattcgtggaacatataagtttacttcacgaactcaaatgaatatcactgagattccgtataagtatgatcgtgaaacttatgtgagtaaaatcttagacccgcttgaagataaaggcttcattacgtgggatgatgcttgtggtgagcacggttttggcttcaaagttaaattccgcaaagaatattctttgagcgataacgaagaagaacgccatgcaaaaattatgaaagactttgggttgattgagcgtcgttcccagaatattaccgtcattaatgagaaaggaaagctacaagtttacgataacgtagttgatttaattaaagatttcgttgaagttcgtaaaacttatgtccaaaaacgaattgataacaaaattaaagaaactgagtcagcttttcgtttagcctttgccaaggcacatttcattaagaaagtaatttcaggtgaaattgttgtacagggtaaaactcgtaaagaactgaccgaagaactttcgaaaatcgatatgtattcttcttatgttgataaattagttggaatgaatatttttcatatgacttccgacgaagcaaagaaacttgctgaagaagctaaagctaaaaaagaagaaaacgaatattggaaaactactgatgtagttactgaatacaccaaagatttagaggaaatcaaatgagtccattcattggtattacaagcgctgcattagtatctggtagcattttactggcgggtttaggcgttgttccagccgtagcaggaggtcttcttgcgttcggaattcaacgtgttatcatgacagttatcacagtcatgcagtaattttagggagagcctcggctctcccttttttattttaaaatttttttcacaaaacggtttacaaccaaagcatactgtggtactatacaactatcaactactgatacagaattacggagattagaaaatgtctaaagtaacttacatcatcaaagcttctaacgatgttctgaatgaaaaaactgctgcgattttaattactattgctaagaaagatttcattacagctgcagaagttcgtgaggtgcatccatatttaggtaacgcagtagttaatagtaatattggggtattgattaaaaaaggcctggtggagaaatctggtgatggattaatcattacaggtgaagctcaggatattatttcaaatgcagcaactttatacgcacaggaaaatgctccggaactgctgaaaaaacgagcaactcgtaaagctcgtgagattacttccgatatggaagaagataaagacctcatgttaaaacttttagatgaaaatggatttgttcttaaaaaggttgaaacttaccgcagtaactatctcgctattttagaaaaacgtactcacggaattcgtaattttgaaattaacaacaatggaaatatgcgaatttttggatacaaaatgatggaacatcatattcagaaatttgctgatatcggaatgtcatgtaaaatcgctaaaaacggtaatgtgtatcttgacattaaacgctcggcagaaaacattgaagctgtaatcactgtagcatctgaactgtgaggaataaataatgaacaagttagaaattgttaatgaacttcgtcgttgcgcagaacctactcaagagggttgggatatttggtaccatggagcttatcttggaactatcgtaaagattaagactggtaaatacatgattattcgtgaaagtaaagatgctccagtaggtattcgcaataattttatggcagcgataagttcatttacggatgcagcttacgaaatttaccttgccgattataaagaattccaggaatctcaaccagttattcgttcaattggtgtcaacaaagctcagcagaaaactttgtggcagcgtattaaaggatggtttaaatgaacccatttattaatcgtttaaaaatgctgaatgtgcctttatctcgtgagactccggagagtcttgttcaaaaatttaaagcgcatggttataaatgcacagaagaagatattctgaaagaagttcctgaaatctgttggcagactgcatactgggatgaaaatcaaaagtatcaacgacgaattgtctgtgcagctaatcgttttaaattaaaagatggacgaactcttattattccaggtgctcgtcattattctaaagatatggcagaagttttagatgtagttaaacctcagttagttactcaacaagtttgtgatgatgaccaagggtttattgaccaatatagtaattattggacacgtgaagaagcaatgattattgcaacttatgctgggcaggtgcgtattgaacgtggtggtagtgaaaaagaactttactctgaggacctttactaatgaatattaaaaagtttcaaattgatggaattaagaatcaaatccaggcgttggaatatgccaataaaatgatgtcaactaattggggaatttatgctaatgagcctgcatttcagttttgtgatatggaattaactaaaaagcttgtaggaaaagattatgtatgtccatttagttccccgataaatggaatgctaaaacctgctttacgtgatctttatattgcgatgaacgaagagatgataaaagagctaaaacgtcaactgaaggtgattcaatttggccagggaaattaattcaaaatcagattattttaattctctcaacgataaagataaaaatctaatacggcactttatcgttgagatgggatataccgatacacgcgatttaagagaacatatatttgaatgtggtgtagctaaaaagttttcattcacatgcaaatgtttaagagaggtaattcagcactatgaacaatttagtcgcaaaacataattttaataaagcttctgttcataaagataagaagaaagcgtttaaagaatctaatcgcaaacagaaacataaggggaaggtctatgattattgattctcaatctgtggttcaatacacaatcaaaattgatattctagaaaagctatataagtttctaccaaacctataccattcaattgttaatgaattagttgaagaactgcatcttgagaataatgatttcttgattggaacttataaagacctctcaaaagcaggatatttttacgtaattccagctccaggaaaaagtattgatgatgtattaaaaattataatgatttatgtccatgattacgaaattgaagattatttcgaatgagtcataatcttgaaaaggtaatcgagcataatgtagctcaggaacgtgagtcgttcaaggaattcgtagaaaaaatttttgaagaaaataacacagaccagtttacaaatcaagcgtctgatgatattataacaaagtcaactaattgagtggtatagttaatgaataaaaatattgatacagttcgtgaaattattactgttgcgtctattttgattaaattttccagagaagatattgttgagaatcgtgctaattttattgcatttctgaatgagattggagtaacgcatgaaggtagaaagttaaatcagaattcattccgtaaaattgtttctgaattaacccaagaagataagaaaaccctcatcgacgaattcaacgagggttttgagggtgtatatcgatatctagagatgtatacaaacaaataattatttagcccttcctaatattctggccgcctgggcacatattgattcaaggcggtcattacttatatgatcatttctataccagtacattgttatcgttccagcatagatattatccaaattaaaatatggacaactgtacatgtagtttatttcgggagtaggctttttagttggtaaaaaagcaaattttgagttggaataataatgacgtccatttaaatgaactgtatattcatccatagttttatcaacaggatatcctccaagtgatttttcacttattgttgaaggtaattttccttcatatgctataatatcaacaaaatagtttaagtttttagggcggaaagaatacaccgcactaaagtctgcctcagatgatatgtgaactatctggagttgttccagggcgacagattcaaagcgtgcgtttctttccttttcaataatttcactgtatgtttcatactttgattgcttatagtactcaaagaaactatctcccctataccaaacaatcgccatcataaataaaagaattacgacagctactcgggaagcaagaaccttcccggtagcgttatctttgaacaagcgatctagaacacccaacagaatatcagagggcgaaaatgatattctaggtgctgccatagaccctccttttaaggatatttattcaaaattatacccttggaccatatattactccaacattttgccatgttggagctgatcctataacagcatatccggcagcgccaccagctccaacttttagaactttaccgccatcatgccaggcattttgtccatttgcgccagcatcaccaccctggccagagtgagcattaccataattataaccacctcctgggccatcataagaagctgcgccgccggaataacctccgcctcctcctgggccaaatggtcttcctccaccaccaccaatatcttgccaatttgcaccagagtgaggatgataagcgataccacctccacctccacctccaccacaaattactccaccgttattaattcttaatcgtccaccgatgtcattttgaatacaatgaccaccttgttgaccattaccatctccgccggaatgagtccatccaccttgtccacctctaccccacatatggacgccgccaccaatattcaactgaacatattcattaggtgtatctccgtacatgaagaataaaggaacgtctctagaatatgataccaaatttccggtaatattaaacactataggtgcactacctgcctcaaaacatctatctcggaaccattgaccattgaagttatggtctgctccaagtgtatgaataatttctcttgagcgacctgcaaattgactcatccagcaaggaacacccaatcttaattgaccagctgcttgactcatccagcgctgacccgtttcatttacggctgaacttccaatccagccaggaactccaactactgccataatttatactccaaagggggcatttcccccttgttgttagaatttaaaatatttactaattttgcgagcaattttagtaaagagaggcgttttcaattctttaatttcttcactcatttcctgaatagccttaattaaaagagcattcaccgcagagttagaaattgttaaaatctcttctgggttatcaagagatccgacattagaagtgctaacagcttccggtaaaatttcttgtaaatcctgcgcgataataccaatctcatgtgcgatgacttctcggtcagaaagagacttaactttatcgtaggttttaacttttagtttatttaccttatctaccgcattttcttcgtagtcttcaacgttaattttcagacgacggtcggaacgaatataaacatcgttacagtaaaccgacgcactagatgtgaaatcaccatttgcagcccatgaataccagccgcctttgttcatatgcatcattacggtagcattaccaccgccagcatgaacacccattgccgcaagataatcagcaccccaatgaactgctttccaaattgaatatgcttgggtttgtgaattctgacaatctaagagaataccagcaggacggttgcgccagtcatcccaagcaccaccaaaaacatcaccacggataagagcgtattcactattataaggaacttgctctcccgctttaatcattgcaccctggaagtgatgactaaatgaacccccatgattattgcgaatatgtaaaataccctcatctgtagcccagataacagccttttctgcatcgctatcatctttaaaccagatgtggcgagcaccagttgagtttttgatggttattccgctaggtccatgcacggtcaaagaaccagcaacatcaaacatcaaactgttatctgtcctgcgttcagcatagaagtgataaccttttgaatcgccgacttccaatactgccgcgcgaccaacttctgaatttccccaattgttgatagagaatcgttcagagctattattcatctgatttaggtataatgtaccatcagtgaatgtttcgccaaagaaacgagttttaattgcacctgtcgctaaagtacgttcagtggaaaaatgggcgccttgactatcttctaactggatgatgttatcacgagcgttattgctatcaccccaatggttaaatttaaaataatctcgtgatcctaaacgtccggcgtcaaaagtcatcaagcctttcatgttaatatcaccgccgaccagaacgttatccgggaagttaactgtaccatcagcattaaatcttgatgtatggccctgtgttccatcttctttgatatggtgtatcacgaatgtacctgaattaatttcagtacctaaagaccaaactgctttaccttgaaggtatttttgcttaacaatcggataatatttgcttatagcagcatcatcatcgatttcctggaaaataggagccgcttgaacatattgaatatcataaccaccagcgccagcgccatgaccagtaaatttaatatagccgtttgctgcgaacgtattgtaacttgattgtaaatctggaatagtaactttaccagtatctaaagccatactaaacgggcgaagtggaccgatatcgccatgtttaccttcaccgtaagcagttggaataatatgaagactgctttctgaacgtctaaaaatagctccataatctgcgttccaaatgcgaagaccatttacagcatttgtcgcgatttcaccggctgcgctgattgtaccgtcaaatgtagcattttttactactgtaaagttttcattaacaatctgggtgccatttataaccgattcgattttacccgcagttgttcgttgaatataatgcatccatccaatatcatcagaaatttccatgacatttttacgggtgccttcacttggattagtaaaagtatttccccaaacagctatatacatgttatcaacggagctttgacccatggtatagcctttaaacattaaagttgaattattatttctaccatcaatattaaccgaaccaccaataacgtcaatattgcctggagtaactaacaaaccgccatgagtattaatgtttgtggtacccttaccgcggaaatagtgatgatagttaccgccttgataatatcctaaaagagtttgaccgtcaccagacgcgttattatcatggtaagtaacaacagtggctaatgcatagttttctgtcggtggcgttgtcataagaatcccatccggagaataacccataaccatttttctaaggctttgtgtttccgcaggaccgtaaatgaaagttcttgttccgttgtttactgcatgaaaatatccgtcctgatgccatttaaatccggtatcattatcgccaatagcaatagaacctttacctaaggctgaatatgtcataggacttgattccatacctactgcaattgaatggcctgcttgaagcccaccgaaataagaaaatgacaacatgtaatcagtaggggttgaaccagaataccaactgatgccgctattttcacaaatttcatggagcattgcggccgctgggtcggtacgtacaatgcgcaaatagtttttatctgtgtcagaattattatttgctaatgaagatatatcataatcgcccgtcttcttcccatctgtaataactttatcggtcagaatttgtggagacgaaatagatttccatgctgatacttcaggtgaagtaaataggccactgcctgaaaatgcataggtgctttcatcaccagcggcgtagtcttgaaccctgatattaagtacttgtgtagttaatccatcattagccggggcataaattattccgcgttcgcggttattgccatcgaaaaaacgaacatgcgctgtacctgaactttttgtaataagttctccgccctcagtcataatctgcccggcggcaataatatcgcgagttactcgagcaataccagttaaattaaaattacctgtctgagtgaaagcgccatttaaagtataatcaccagtttgattatagtttcctatatgaataacattcccgtcaatgctaccgcccttagcaaaaccaagatcaatgatatttccttggtcgtctttagtaaaaagtacgcggtcttttaagtttatagccaattcaccttcggctaatactgaagcggcaggacgtgctcctgcagttttgcttcttttaaattgtatttgttttaaagtagccataagtcctcttaataatagccgaaatcttgaacagaatccttaataacaatttgatcaaatcgtggaacatgtgaaggttgagatgcaggattctgcgaaaaaaggtttggcgcagttaaatttcctgtcatagtatctccagagcgtaataccctagagtttgcgtttgctgtaacaatatttattgctccatcaacataatctttccgtgtaaggtcataattatttactggagataatgaagttgcgcgtatttgtgatgcttcaattacaccctttgagctaatatctccatttcgcgtgttaattactacagttctacccgctgaaccctgtgatgatttaaaaccaataccataccacgaaacaatatccatatttgtagtatcatatgtggcattatcaccaggaccagcaaaaataccgttgtcacctgaccctgcaccaggaacagtcattcctttattaaaaattactttatttaaatacgtaccaccgttagctttagaaacgaaatcgttatcagcagcttgtggcttattatattctgaatatattttaaatgatttatagagtacatcgtcaccggctggattcaatggaaaatttccttgatgccaaatgacagagcctccagttgttgaacctacttttaaatcagccattgtatgcccctttattttaatagtatttataaagaaaaagggaacccgaaggctccctcaatttatacttctctaaattcttgcccaaatactttaccagctttagacgatgcttgcgtaggaagtaccattatatccggaggtgaagcagattcacagatataattaacacgaatgccgttgataccaaattcagcgggttttgaaattccgccatttcttgatacttcagaaaagcttaaatttcgcatacctccttgtcccgcttgagcagttctctgtgcatatatcgtaaatcctactgcgttttctggaacaactacataatcttcctttaattcccatgacccagcttgcccagtaaactcagcatgtgttgaagaaatatatccatttgattcatcataaaaacggatagatatatttgtagttccaagcgcaagtaaatctgcatcagcatataactgagctttaagataaagaacatcgccaggaattaaattataatcagagagtttacttatcgcggatgaagttggtaaacgtgcaatttcgttattagttccaccaactgccgacatgaattgctcaacgctttcgtatgttcttttaggaaatcctgtagctccaacgtcttctaaactatcaaatacaacatctaaaatagtttgatagtcatctgtgctttttctattacttagtttaacatgttctaatgcaatagctcttttagaagaagtgtaaaaagcagcatatgatacgtcgaatcttgacaatatagaatcagatggaaaagcagacgttcctgcggctcttaaccaagatactacttcaggaggaaaattaacttttccgttagttaatatagcaacaagtctattattcgtcaaagaattcatgaaactaacaaaagcagctgatgtagtatcatttgaagtcgaaaaagcatatgacttactatcaactaatgctcccgtggaagggtcaaaaactcttaaatgaaggcctgcgctaaatgtttgacttcctacaggattatcctgaaatttaacgtatggtcctgctgtagaaagcgggcaagaacccgctatgcttattttgtatcttactgaattgctttccgataaaaatggcgtttggacatatccttgtccaaactctgccataaatttttccataatacctcttattcaacccattcaaatttaacagttttattcactgggtcaggaataatgcgaacattaccaattcgtaagaaatcacgaatagtaagattacctattattccattatcagatgggattgctcctatatccgaaggttgaggagggttacctccatcaaatacctgaacaaaacttgaccaagaatttttagttttctgccatgtacgcgtccagcgagtggtacgcgcttctggagttgttggataagtaatccaatcttggtaaagcgaatcaagtgtgttaccaaactgagtcaatgtaccaggagatttaacttcttcgccacgttctaagtatggaagcccagtcacttcattagttttttcaaccattttaaaataacccgggaactggttataagtggctgaatcgttaatatcaattgaccagaatcctacagtatcagattttggagcgcgggtgtataaatcagatgttttagtgccctgagaacgaattctcgagttaacagtcaaaccgcctgaatttatagtagcacctttggcaatgattaagctttcaccaatcgttacttggccagatgcattattaatagctaaaggacgtaatccattaaatccaccagtctgatcacccgatgcagtaagcataaaattcgttactgatccatcattgcgaacaatgaaaccgtaatttccgttaatagcacggaaagcatttgcgcttcgagaaataatttcaccagttgcagtgactgaattaccaaatgttgctacaccatttgcattcaatgttcctgaagcattaacatttatcggtgttactgtaccgttgatgttaaatgttatatttccggctttattgcgctgagaataaaaatgactagatgtttcatcactaacttcaaatacggtagaacgtgttgtgtctgattccccgctaaattgatttccccacactctgactgtcatcgtttgagccgggtttgttccagtttgaggtcctttctcaaaaatcagacgagttgccgttccagtattagaaatagttaatgtactatttgctgaaactgatccaccgaatgtagcagtactagatgatacaagaggggcactcagattcgtttgttgtgttaaggttagtgaaccattaaccgtttgtgcaatatccctacgaatgaactgagatgaatctagaccatccagtaaattactatctacagcttttgcttttaacggcaaataatttgctaatacacggtttaattcgtatggcgatactgcataactatttttctcgtataattctaatgactgcgttgaaccaacggtatcattaccaacgaatgtaattgaaccagatgaagttttaacaaaccctcttatcagagtagttgctgcccaagttggttcactctgcacaatccattttaaattttttggagatacagcagtatttgctgacgttccagccacagtttcagactgagttgcaactttaataacaccttcctgtgcttcagtagatttagtacctaaaagctttttaggagttattagaacattatccaatgttcctgcagcagcttcaacttgtgtagccacacgaagtgtaccacgctgtgtctcatttgcttcaagaatattaagggtataatggtcccagagagttcctgattcaactaatccagatagagcaacaacagaagtacgatcagtactattaaatctggttttaatttttaatggcgtagagatacgagtatcgtcgacgcctgtgtcgaattcaacttgtgtagcaatttcagctataccacttaaactttcagttgctctacggtcatttaaagttttaggagtgactgcacgagtataatcagttcctgtattaacttcactttgcgtagcaatttcaattaaaccaattcttccatcagttgatgtctttttatgtaacgtttctggcgttacaacagcatttgcccatccttcttgactttgaccagcaattacttcactttcaactgctaaaattactgcaccctgttgagtaggcgtagctttatactggtccaaagcttttggcgaaacaactaaattattagtgtttttattataaacattcgtaccatttaattcacggctagaagctggagtagcacctgcagtagatacaaaagttacaataccagataatgattcagaaccttggcgagcttgaagctttttaggagtgatgattgtcgtatcatcggttcctgcattagtttcttgctgtgtagcaatttcagcaacacctctgcgagtttcagtagctgttctttcattcagctttttaggagtgatgataatatcatcagcaaaagagaatgtagtatcctggttaacttgagcagtagttgctattcttgcgatacctctacgagtttctgtagcagtacgattagctaacgtttctggagtaattgccaattctttttgtggagaattttctaaatcagcatttgcttgagcttgtgtagctaaagcaattacgcctaatcttgctctagtagaattatttaaagaatctactctttctacagttggaacgttttgctgtacaacccagtattttccatcagaatcttctatataagcaagttgcaaaactggaacataattagtttcaccattaaaaactaattcttggactgtaacccattcagcttcaggcggatattctgagcgttttgggaattgcagcaattgaactgaagaagcaattttatcttcaccggcagctttgattttaactgtttgtccttttctcatgtaattcatggaaattttgacagtatcaccaacagaaatatcagtcggaagctgaagttcaattgtttgggttgttccattattcgcaccaaataccataacttcttcatttggacgaatattagaattagtcgttataatgcgtaaacgtgctttactatccccgtcaaacaatctccacaatttctcattatcatcaaacatcaagaaaccgtcaatcgatgtacgaccttcaatggaatgagttccaacttcttgtactgaagttgtttcatcatatgtagtaacaattgtatgataaagaggatttaatttatctaaatcaacgaaattaataatatcgccatgattagcaaatcttggaagtttaatattaatcggcgcagcggaagtaaatctacgcacgataaaatcgttagattgcgcctgataaagacttgccggtgttacaattgcagcttctctactataatcagcaacatacatttgccacagacgattactaaaaattaaaactatctgcgattttggatgagtcattagtactgaacgtacttgttcacctctaaagtttacaatactttgtactgaagctgcaattaaaacttggttaactccaggttttcctccaatatcttggagaacgatagtatcaccatcaattggagaagatggtaaagtaaatgtaatgtcattaccagctgcagtatcaactgaaattgattcacctgactttaattgataaggtcctgatgaaacagttgtccagtttgcatcggtacgtaacgctctccatcgtacgctattaaaagctcctgctggttttggaatatcatttatagcagcccaaaagcggttatcataaatgattacaaaatcttttaaatatccacgagttggatcatattgttgaactgtgttttcttgaattaagtaatcaacgttaacaccgtcagttcctacggtacgatcagctaaagctacgttgattattttatcaccacctgcgtccagaccatcttctgctctgaactttcttttaatctcggccattctcccgggctcctattgtgttttcaataataagtatttatacttgtttactttaagatttggatggtatataatagaaatctcactaattgaacgaggttcatatggatttagaaatgatgctggatgaagattacaaagaaggaatctgcttaattgactttagtcaaattgcgctttcaactgctttggtaaacttcccagataaagaaaaaattaatttatcaatggttcgtcatttgatattgaactcaattaagtttaatgtcaaaaaagcaaaaacgctcggatacactaaaattgtactgtgtattgataacgcgaaatctggatattggcgtcgtgatttcgcgtattattacaagaaaaaccgtggaaaagcacgagaagaatctacttgggactgggaaggttattttgaatccagtcataaagttatagatgaattaaaagcttatatgccatacatcgttatggatattgataagtatgaagcagatgaccatattgctgttcttgttaaaaagttctctttagaaggacataagattttgatcatttcatcggatggtgactttactcaacttcacaaatatccaaatgttaagcaatggtcgccgatgcataagaaatgggttaaaattaaaagcggttctgctgaaattgactgtatgactaaaatccttaaaggcgacaaaaaggataacgttgcttcagttaaagtacgatctgacttttggtttaccagagttgaaggtgaacgaactccttcaatgaaaacttcaatcgttgaagctattgctaatgaccgtgagcaagctaaggtgcttctcacagaatctgaatataatcgttataaagaaaatttagttctaattgattttgattatattcctgataatattgcttcaaacattgtgaattactataattcatataaattaccaccgcgtggcaaaatttattcatattttgtaaaagcgggtctttctaaattaactaatagcattaatgaattttgaggtgaataatggctaaaaaagaaatggttgaatttgatgaagctatccatggcgaagacttggctaaatttattaaagaagcatctgatcataaactgaaaatttccggttataatgaattgattaaagatattcgaattcgtgctaaagatgaacttggtgttgatggcaagatgtttaatcgtctattagctttgtatcataaagataatcgtgatgtgtttgaagctgaaactgaagaggtagttgaactttatgacacagttttctctaaatgatattcgcccggtcgatgaggccgggctttcagaaaaagaactttcaattaagaaagaaaaggatgaaattgcaaagcttcttgaccgccaagaaaatggatttattattgaaaaaatggtagaagagtttggaatgagttatcttgaagctacaacagcattcttagaagaaaattctattcctgaaactcaatttgctaaatttattccttcgggtataattgaaaaaattcagtcagaagccattgacgaaaatcttttacgtccttctgttgttcgttgtgaaaaaactaatacattagattttctgctatgattaaactccgcatgcctgctggtggtgaaagatacattgatggtaaatcagtttataaattatacttaatgataaaacaacatatgaatggaaagtatgatgttattaagtataattggtgcatgcgggtgtctgatgccgcttatcaaaagcgaagggataagtattttttccagaagttatcagaaaaatataaattaaaggaacttgctttaatctttataagcaatctggttgctaaccaagatgcttggattggtgacatctctgacgctgatgcacttgtgttttatcgtgaatatatcggacgcttaaagcaaattaaatttaagtttgaagaagatattcgcaacatctattattttagtaaaaaagttgaagtttctgcttttaaagaaatctttgagtataatccaaaagttcaatcaagttatatttttaaactacttcaatcgaatataatttcgtttgaaacgtttatcttgcttgattcgtttttaaatataattgataaacatgatgaacagactgataatttagtctggaataattattctataaagttaaaggcttatagaaaaattttaaatattgattcacagaaagctaaaagtgttttcattgaaactgtgaaatcttgcaagtattgatatgaatatagtatattggtttacatttgaagaccgtgtcaaaaataagactccaccgtactactatatcggtagtaaattaaattgctcatttgagaacggaataatatatgactcttccggaaaggaatactggagctcatgtaaacaaaaaagatttttgaatgcgctaatgcttcaaaaaccgagcgttaaaataattcaaattgatgatgacttggatgttattgaagaagaacgaaaataccaacttgaagtaaatgccagagataatccagactattttaatctggtatatgctggtggtggatttggtgtgagtggtgaaactcatccagccaaagacccggaagttagagagcatatgagattggctaattatatgaaccgtgacgattttagaccttggaaaacatcacgagctaatatagagtcttggaaattatctcatattgcttatgagaattatgcgttattattatcctctaatctgtacggtaaaactcctggatggcgaagagttaaaggtaatataaatataactgatacaactgctaaatcgatggtaaagtatttcaactcaggttggatacctctcgaagacccagagtattgcaaattatgccagctatgaggtaaagtgtcatagcaccaactgttaattaaattaagttaaaaaggaaataaaatgtttaaacgtaaatctactgctgaacttgctgcacaaatggctaaactgaatggcaataaaggtttttcttctgaagataaaggcgagtggaaactgaaactcgataatgcgggtaacggtcaagcagtaattcgttttcttccgtctaaaaatgatgaacaagcaccattcgcaattattgtaaatcacggtttcaagaaaaatggtaaatggtatattgaaacatgttcatctacccacggtgattacgattcttgcccagtatgtcagtacatcagtaaaaatgatctgtacaacactgacaataaagagtacagtcttgttaaacgtaaaacttcttactgggctaacattcttgttgtaaaagacccagctgctccagaaaacgaaggtaaagtatttaaatatcgtttcggtaagaaaatctgggataaaatcaacgcgatgattgcggttgatgttgaaatgggtgaaactccggttgatgtaacttgtccgtgggaaggtgctaactttgtactgaaagttaaacaagtttccggatttagtaactacgatgaatctaaattcctgaatcaatctgcgattccaaacattgatgatgaatctttccagaaagaactgttcgaacaaatggttgacctttctgaaatgacttctaaagataaattcaaatcatttgaagaactgaatactaaattcggtcaagttatgggaactgctgtgatgggcggtgccgctgcaactgctgctaagaaagctgataaagttgctgatgatttggatgcattcaatgttgatgacttcaatacaaaaactgaagatgattttatgagctcaagctctggcagttcatctagtgctgatgacacggacctggatgaccttttgaatgacctttaatagattatattactaattaattggggaccctagaggtccccttttttattttaaaaattttttcacaaaactgtttacatccttgtccttccatggtactatacaactatcagcaatactgctgacgattaaagaggaaaacaatatggctaaagttgatattgacatcgttgattttgaatatattgaagagattattcgtaatcgttatcctgaacttagtatcacaagtgtacaagattctaagttttggagcattcaaatcgttattgaaggtcctttagaagttcttgagcggtttatggctaatgaatactgcgatggtatggatgctgaagacgtagaattttacatgggactgattgaacaataattatcaaggggctattaagcccctattaaaatgaggaaaatcaaaatggaaatcggcaaaaaatacgagttaaatccacatcgtattaaatctttcattgatattagttcatcaaatgctagtatggtcggcatcattcaagaaaatggcggttggtttgaagttaaatcaatatcaagtttagatggctttgattatgtaaccgaaatcatttgtgctaatggtgaaatctataatgatgatggtatgggtgatgattattttgaacttagtgaagaagagttttattgtttccgcgaatataaagaaccgacttctgaagaggatgaagtcaaagacaaggtttctggcgtaacaaaaattcactgcattgttgacgaaaacaatgcagatgaaatcattgaacttttgcgaaaaactttcaaaaagtagtttacatcagggtagtagtgtgatactattaccctatcaaaactaatggagaaaagaaaatgttcgcaccttatattatggcagcagttatgttggtctgtttatatcttttgattaaagcttgctaaggagaataaaatgagattacaacgtcagagtatcaaagattcagaagttagaggtaaatggtattttaatatcatcggtaaagattctgaacttgttgaaaaagctgaacatcttttacgtgatatgggatgggaagatgaatgcgatggatgtcctctttatgaagatggagaaagcgcggggttttggatttactattctgacgttgaacagtttaaagctgattggaaaattgtgaaaaagtctgtttaaggaaaataatatgatttttgtatttgaatttatgaatgatgaattcgattatgcaatttttaacgcattgcataatcctgatttaagtgaatttaatgaaatgttttctgatgctttgagtatgtcagaagaatactgtggagaatgtcaacgtgtttgtgtgacagtttttgaaaacaaagaaaagacgtatgaagaattattctttgatgctaataaagccactgaatggtttatcgaaagaggatttgcgtaatgattaaattggtattcgcttattctccaactaaaacagttgaaggctttgacgaattagcatttggtttaggtaatggtttaccatggggacgagttaaaaaggacctccagaattttaaagctcgtaccgaaggtacaattatgattatgggtgctaaaacgttccagtcattatctacattacttcccggtcgtagccatattgtggtgtgtgaccttgagcgtgattatcctgtaactaaagacggcgatttagcacatttctatattacttgggagcaatatataacttacatttctggcggcgaaattcaagtgtcaagccctaatgtaccattcgagactatgcttgatcagaattccaaagtaagtgtaattggcgggcctgctctgttatatgctgcgttaccttatgcggatgaagtagttgtttcccgcattgttaaaaggcatcgtgttaattcaacggttcaattagacgcaagttttcttgatgatataagcaagcgtgaaatggttgaaacgcattggtataaaatagatgaagtaacaacccttacggaatcagtatataaatgaaataacacgtggcggaaaatatgaattttaattattaccctattctattagaagaagacgcgaaacagccaaagtggcagggtcctcagtttattaaaggtgtctatcaattagtagttcctaaagacaagatttatagcagttgtttcactgaatccgcttgcagtattttcggtaatagttctccgtattggaattttgatataaaactggatagaaatatcgatatttggttgaaagctatggatattggcaatattacgtttgatgagaataattatcatattattggtcgcttttccaaacgcggtaaagaattgtatttcacgcctgaaattgaaagaaaatttgatgctaaaccgtattgattatttagcttcataaaatgtattataatttatataaggtactaaatgaaacaataccaagatttaattaaagacatttttgaaaatggctatgaaaccgatgaccgaacaggcacaggaacaattgctttgttcggtactaaattacgctgggatttaactaaaggttttcctgcagtaacgactaagaagctcgcctggaaagcttgtattgctgagctaatatggtttttgtcaggaagtactaacgtaaatgatttacgattaattcagcatgattcgttaatccaaggcaaaacagtttgggatgaaaattacgaaaatcaggcaaaagatttaggataccatagtggtgaacttggcccaatttatggaaaacagtggcgcgattttggcggtgtagaccaaattatagaagttattgatcgtattaaaaaactaccaagtgataggcgtcaaattgtttctgcgtggaatccagctgaacttaaatatatggcattaccaccttgtcatatgttctatcagtttaatgtgcgtaatggttatcttgatttacaatggtatcaacgcagtgtagatgttttcttgggttaattgaggcctaggtataaggtgacttatacttgtaatctatctaaacgggggacctctctagtagacaatcccgtgctaaattgtaggactaccctttaataatttcatcaggattagttacttaccgtgtaaaatctgataaatggaattggttctacataaatgcctaacgactatccctttggggagtagggtcaagtgactcgaaacgatagacaacttgctttaacaagttgaagatatagtctgatctgcatggtgacatgcagctggatataattccggggtaagattaacgaccttatctgaacataatgcttccatttaatattgcatcatatgctacgttagttcatattgtagctaagatgtgtaatcttattccgggagatttgatattttccggtggtaatactcatatctatatgaatcacgtagaacaatgtaaagaaattttacgtcgtgaacctaaagagctttgtgaactggtaataggcggattgccttataaattccgctatctttctactaaagaacaattggaatacattcttaaactcaggcctaaagatttcgttctcaaagattatcagtcccacggtgtcttgaaaggaaaaatggcggtataattttaatttaattgcgaggatatatgattttacgatttaaagatacttctggtgtcgttctttttacacttcctaatccaagcgagttagaagttccaggaccaaatcagcctattatcatttatggcaaaaaatattatacccataaaatgactcgtgagtattttgataataaaatttctacagttaaaacttcttcagattgttactatgatattactgttttaacggaaaaacaatatgacgaattatcaccgcgcgggccgtctatgccgggtagtgaataaatataaatccgactttgatgttaatattcaccgtggtacattttggggaaattacgtcggtaaagatgctggcagccgggaggctgccattgaattattcaaaaaagattttatacgtcgaattaaatccggagaaataactaaagcacatttagagcctttacgtggaatgaggctaggatgcacatgtaaaccaaagccgtgtcatggtgatataatagctcatatagttaaccgattgtttaaagacgattttcaagttgaggacttatgcaattaattaatgttatcaaaagtagtggtgtttctcagaactttgacccacaaaaaattattaaagttttatcttgggcagctgaaggaacatcagtagatccttatgaattatatgaaaatattaaatcttatctccgtgatggaatgacaactgatgatattcagactattgtcattaaggctgctgcgaattctatttcggttgaagagcctgattatcaatatgtagctgcacgttgtttaatgtttgctcttcgtaagcatgtttatgggcagtatgaaccacgttcatttattgaccatatttcttattgtgtaaatgaaggtaaatatgaccctgaattattgtcaaaatattcagcagaagaaattacatttttagaatcaaaaattaagcacgaacgggatatggaatttacttattccggggcgatgcaattaaaagaaaaatatctagttaaagataaaaccactggtcaaatttatgaaactccgcagtttgcatttatgactattggaatggcattgcatcaagatgaacctgttgatagactaaaacacgttatccgtttttatgaagcagtatccactcgacagatttcattgccaactcctattatggctggatgtcgtactccaactcggcaatttagttcatgtgttgttattgaggcaggagattcattgaagtctatcaataaggcttccgcttcaattgttgaatatatctctaaacgcgctggaattggtattaacgttggtatgattcgtgccgaaggttctaagattggcatgggtgaagtacgccatactggtgttattcctttttggaaacattttcagactgctgttaaatcatgctcacagggtggaattcgtggcggcgctgctactgcttattatcctatttggcatttggaagttgaaaatcttcttgttttgaaaaataacaaaggcgtagaagaaaaccgcattcgtcatatggattatggtgttcagctgaatgatttgatgatggaacgattcggaaagaacgactacattactttgttcagtccgcatgaaatgggtggcgagctttattattcttattttaaagaccaagaccgtttccgtgaattatacgaagcagcagaaaaagaccctaatattcgtaaaaagcgtattaaagcccgtgaactatttgaattgctcatgactgaacgctcaggaacagcaaggatttatgtacagttcattgataatacgaataactatactccgtttattcgtgaaaaggcacctattcgtcagagtaacttgtgctgtgaaattgctattccaacgaatgatgtgaatagtcctgatgctgaaattggattgtgtactctctctgcattcgtactggataattttgactggcaagaccaagataaaattaatgaattggcagaagtccaggttcgtgctcttgataatcttttggattaccaaggatatccagttcctgaagcagaaaaagctaaaaagcgtcgtaacctcggtgtaggtgttactaactatgcagcttggttggcaagtaactttgcttcttatgaagatgctaacgatttaacacatgaactatttgagagattacagtatggactcattaaagcatccattaaactcgccaaagaaaaaggaccttgcgaatattattcagacactcgttggtctcgaggcgaattacctatcgactggtacaataaaaagattgaccaaatcgcagctccaaaatacgtttgtgactggtcggcgctgcgggaagaccttaagctctttggcatccgtaatagcacattatcagcacttatgccatgtgagtcatcttcccaagtttctaacagtacaaacggtatcgagcctccacgtggaccagtctctgttaaagaatcaaaagagggctcctttaatcaagtcgtgcccaatattgagcataacatagacctatatgattatacgtggaaattagctaagaaaggtaataaaccttatcttacgcaggtagctattatgctgaaatgggtatgtcaatcagcttcagcaaatacatattatgacccgcagatttttccaaaaggaaaggttccaatgtcaataatgattgatgacatgctatacggatggtattatggcattaaaaacttctattatcataatactcgtgatgggtcaggtacagatgactatgaattagaaacacctaaagctgaagattgttctgcgtgtaaattgtaatgaattatcaaaaaatctataatgacctaatttcccgggcgaaggctcgggaacctttatccgaatataaagagactcatcatataattcctaaatgtttaggaggaaccaatgatgttgaaaaccttgtggatttaactggtcgtgaacactttttagctcatagattattaaccaaattcaattcttatcctggtcttaaacaagcctttggtatgatgtgtttgaccaataaagggagaaattataacgtttcttctaggctatacgaattaggcaagaaacttctatcagaggctatgactggacgtgaaatgtctgaggaaaccaaagctaaaatcagcgaagctttgaaaggacgacaatttacagatttacatatccaacggatgagaaagcctaaatctaaagaacactgtgaaaatatatcaaagtctaaacttggtgtgcttaatcctatgtatggtacaatatctccaacaagaggtgtaccacatacagataaaacaaaattgttaatatctgaaaagactaaatctggtactgaatatccgccatgtccacattgtggcaagaaagttaataagggtaatgctttaagatggcattatgataaatgtaaatttaaggattttaaatgagcacagtttttaacacccaacaagttgatgttttaaatgaaccgatgttttttggttctggtttaggcattgcacgttacgatatccaacgtcataaagtttttgaagaccttactgaaaaatctctctcatttttttggcgccccgaagaggtaaacttgatgttggactctgcgcagttcaataagcttcctcagttccaacaggacatctttacaaacaatcttaagtatcaatcattattagattctatccaaggcagggccccatctgcggtacttatggcactgatttccgacccttcattagatacatgggttgcaacatggacattcagtgaaactattcactctcgttcatatactcatattatgcgaaatctttataccgatccatctaaggtatttgatgaaattgtattagacgaagcaatcatgaaacgagctgaatcaataggtaaatattacgatgatgttctagtcaagactcgccattgggaaaatgctaaagaatttgtagaactagctaaagaatctcctgatgccgattttcgtttaaaccgagctattaagcaagaagccgaagctaaacgtgctttaatgaaatctctttacctctgtttgcacgttattaatgccttagaagctattcgtttttatgtatcttttgcgtaaaatgcgcctttaagcggtaacgtttatcgaaaactcctttaattgctggaaagtcctttataggaaaactagcagccaaggttttgcttgcacctttaattagtataatataaatatgattatacttttaagaggatgcacaattgaactatagaaaaatttggatagatgctaacggacctatacctaaagattctgatggaagaacatacgaaatccatcataaagacggtaaccgtgaaaataatgatttagataatttgatgtgcctttctatacaggaacattatgatatacatttagctcaaaaagattaccaggcttgtcatgctataaagcttagaatgaaatattctcctgaagaaatttctgaattagcttctaaagccgcaaaatctagagaaatccagatttttaatatccctgaagtacgagctaaaaatattgcctctattaaatctaagatagaaaatggtacatttcatcttttagatggtgaaatacagcgtaaatctaatttaaatagagttgcattaggtatacataattttcaacaagctgagcatattgcaaaagttaaagaacgcaatattgcagctataaaagaaggtactcatgtattttgcggtggtaaaatgcagtcagaaactcaatcaaaacgggtaaatgacggttcacatcatttcttatcagaagaccataagaaaagaacatcagcaaaaacattagaaattgttaagaacgggacccatcctgcacaaaaagaaatcacatgtgatttctgtggtcacattggtaaaggtcctggattttatctaaaacataatgacagatgtaaattaaatccaaatagaattcaattgaattgtccatattgtgataagaaagatttatcaccatcaacatataaacgatggcacggcgacaattgcaaagcaaggttcaacgactagtcttcggacgtagggtcaagcgactcgaaatggggagaatccctctgggattgtgatatagtctggtctgcatagtaatatgtagcagttcataagagaacgggttgagaattagcgagctcaatcgaacataacggtacctttaacttccataagaacatggaaatcatggaaggtaatgctaagattatgaagttcattgcgcgtgatgagcaacttcatcttaaaggcactcaatatattattcgtcaacttcaacttggcactgacggtgatgaatgggttaaaattgctcaagagtgtgaacaagaagcagttgatattttcatggaagttaaccgccaagaaaaagattgggcagttcatttatttaaagatggtgatgttcctggattaaatacaaatagcatgtggagctttattgattacttaactgtatctcgtatgaaacagtgtggtcttccatgcccaattaccgatgctccggttaaacacccatatccttggattcgtgaatatcttaattctgataatgttcaatccgcgccacaagaagtagaactgtcatcttaccttgtagcacagattgataatgatgttgatgataaagttatgatgagttttaaaaaatatttttaaggagtgggccgcaaggcccattttattatgaaagaaattgcaacagaatattcatttattaaatatactgagctagaattagacgacaacggaagtataaaacaattatctattccaaataagtataacgtaatttatgctattgctataaatgatgagcttgtttatattggaaaaactaaaaatttacgtaaaagaataaactattatagaactgctattaaccgtaaagacaaaacgtctgattctactaaatctgcattaattcatgctgcgctaaaggaaggaagcaaagttgaattttacgcccgccaatgttttaatctttctatgacaaatgagttaggtacaatgacaatcgcaacgattgacctagaggagccgctattcattaaactgtttaacccgccttggaatattcaacacaagaaaaaatgatgcttccacatggagtgtggtactatattcaaaacacaaaagaggatacacaatgcaagaactttttaacaatttaatggaactatgtaaggattcacagcgtaagtttttttactcggatgatgtaagtgcatctggaagaacttacagaattttctcatataattatgcatcttattctgattggttacttccagacgcattagaatgtcgtggaattatgtttgaaatggatggagaaaaaccggtaagaattgcttctcgtcctatggaaaagttttttaacttgaatgaaaatccattcacgatgaatatcgatttaaatgatgttgattacattctaacaaaagaagatgggtctttggtatcaacgtatttagacggtgatgaaattctgttcaaatcaaaaggttcaataaaatctgagcaggctttaatggctaatggaattttgatgaatattaatcatcaccagttgcgcgacagacttaaaaaattagccgaagatggatttactgctaactttgaatttgtcgctccaactaatagaattgttcttgcttatcaagagatgaaaatcattttattgaatattcgtgaaaacgaaaccggtgaatacatttcatacgatgatatttataaagatgctgctcttcgtccatatctagttgaacgattcgaagtcgatagccctaaatggatagaagaagctaaaaatgcagaaaacatcgaaggctatgttgctgtgatgaaagatggttctcattttaaaattaagtctgactggtatgtgtctcttcatagtacaaaaagttcattagataatccagaaaaactgtttaagactattattgatggtgcatcagatgatcttaaagcaatgtacgctgacgatgaatactcatatagaaaaattgaagcatttgaaacgacttatctgaagtacttagaccgagctctgtttttagttcttgactgtcacaataaacattgcggtaaagatagaaagacttatgcgatggaagcgcaaggtgttgctaaaggtgctggaatggatcacctgttcggtatcattatgagcctataccaggggtacgatagtcaagaaaaggtcatgtgtgaaatcgaacagaattttttgaaaaattataaaaaatttatcccagaaggatactaagctgtttacaagtccctcgtgttgtgttatagtagtcttattgacataacatgaggactttatgatggatttacagcttattactactgaaatggtcgttgaagcatacggtgatactacagatgggatttctgtattcaaaggaaatcgtcgagttggatatatcactgatcttaagaaagatttagctaagcaagtcaagcggaaaacgaccattaaagaatatcgaaatcgtcgtcttgagcaagcccgtgatatgcttcctgatgcggttgaagagatgaaagtctttttagaaaatcaactcgctaagtatgattgtgaagtgttcattaatcagactcaacctaatgttcatatcaatagctgtaaatgctatatcatcgttaatcctttgactggaaagcatcgtcttggaattagtaatccaaatcgcagtgcatcggatatggcagaagatgttgaggcatgctttaaaatttctaaatctccggctgaacatcatattttaattaacggtctttctcaagacgatattatagaggttattaaaactttatgcaattaagtaatacgacaacaggtttgctattaattgtaattgcattaggcggaacttctttaattttaaaaaataaaattgaaagattagaaacgtctgttgtagaaattacaaaaacggccaatgaaaacgccttagcattaaataatttgcgaattcagtataattatattgatgcgatgaataataaaaatcgtgaggcaattgctgctattgagcgtgaaaatgaaaaactgcgcaaagacgcaaagaaggcggatgtggtggctcataagccaggattggttgaaaaacaaatcaacaactccttcaacaagttcgcagaagacatccaggacctttctaaatgattaaactatcagcagtaatattatctattggtcttctagttggttgttcgacaaagcctctagaagtaaagaaagaaacagttcatcctaattggcctgtacaaataaagtcatatgatgaagctaaactatcttggcaagttaaagttatcgatggtaaagcttgggtcggtatgccatttgaagattcccaggaatttcgtatttggcttaatgatgtaaaacgatatgtacatgaccagaaaactatgatatgttattatcgtcaagagctaaaagaggataaatgtaaatgatttcatggcatcaatttgaacatctcaaaggattgatttatgaatccgagatggctgcaatgatttatggacgccagattcagcgattagaatctttacctccaactaatgatgttttattagctcaatcacgcgctaatctcaaaaatgaatatcaaaataagtggggtaaagcatctaaagacctgcatgattatattcaatcattggttgagaaaaataaatgaaaactctgttagaacgttatattgagtgctcggaccgttacattgatgcatgccgtgaaaatgtatcaagcattagcgaagacattgaatatgctaaagctttagatgacgctggtaaagctctacgaaaagaagcaaaagcccgtgggcttgatatgtatcagcttaaaaatcacatgataaaatttatttcatccaatgttcagagcaaatcggtgaatcaatcaacagctgaagcgtataaaggacggcgtgagcataatattcgtattcttgaagttttcttaggaattaaatgatgaaaaagattattttgactgttggatgtcctggttcaggtaagagcacttgggctcgtgaatttattgctaaaaatcctggattttataatatcaatcgtgatgattatcgtcaatccatcatgggccatgaagaacgtgacgagtataagtataccaaaaagaaagaaggtatcgtaactggtatgcagtttgataccgcgaagagtattttgtatggcggtgattctgtcaagggagtaattatttcagacactaacttgaatcccgaacgtcgcctagcatgggaaacttttgctagagaatacggctggaaagttgaatataaagtgtttgatgttccttggactgagctagttaaacgtaactcaaaacgtggaactaaagcagtaccaattgatgttttacgctcaatgtataaaagcatgcgagagtatctcggtcttccggtatacaaagggactcctggtaaaccaaaagcagttatttttgatgttgatggcacactagccaaaatgaatggtcgtggtccttatgaccttgaaaaatgtgatactgatgtcatcaacccaatggtagttgaactgtcgaagatgtatgccaatatgggttatcagattgtcgtagtaagtggtcgtgaatgtggtactaaagaagatccaacgaaatattatcgtatgacccgtaaatgggttgaggatattgctggcgttccattagttatgcaatgtcaacgcgaacaaggtgatacccgtaaagatgatgtagttaaagaagaaattttctggaaccacatcgcaccacattttgatgtgaaattagctattgatgaccgaactcaagtagttgaaatgtggcgccgcatcggtgttgaatgctggcaagttgactcgggagatttttaatggcgtggcatcatgaaacttgggatattattaattggcttgaagaaaattatgtgaggtaaatatgtttccgacttattctaaaatcgtagaagtagtgtttagtcaaattatcgctaataatatgtttgaaaagcttgataacgcagccgaacttcgaatccacgctcaagtgactcatgtattgaacactttgcttccagaccaggtggattctgttgccattacgctgtatccaggttccgcgcatatcattgtcgtattcggtcttgatgctgagttagttatcaaaggcgacattcgctttgaatctcaaactgcggaattcaaagcgatttaatagtttactttacggtagagttgtgatattatagctttaccaaaacaaatgaggaaattgaaatgctaagtgaaaaaccaattactgttaaagaattccaagaaaaagttaaactatttgctcaggaattggtaaataaagtttctgaacgatttcctgaaacatcggttcgtgttattaccgaaactcctcgttcagtattagtaattgtgaatccaagtgatggtgaccaaataacacatctcaaactggattttgatggattagttgaagcacaaagggtgtatggcgtactatgatgaatttaactgatataattgataattgtcttgaaaatgatactggcgatcatagagcgcttgattctgaaacagcacagttcattagaataactttaatgaatgatactctagtgaatagtattcatccttctgtgtatgatgctattattgtgacgaagtatccagttgagcttcacaaaaagatggctggtgcaatttttattgataagaaaaaccgctttaaagatgggcagaatataattagttctgttattaaaagtataactaaacttcgtcacgaaatttatcgtgttgaaactgctaaatctgcttatctggtgattatgaaatgaaagcgagtacagtacttcaaattgcatatttagtatcacaagaatccaaatgttgctcctggaaggtaggagcagtaattgaaaagaatggacgtattatttctaccggatataacggttctccagcaggtggtgtgaattgctgtgattatgctgctgaacaaggctggttgctgaataagcctaaacatactatcattcaaggtcataagcctgaatgtgtatcgtttggttcaactgatcgctttgtcttggcgaaagaacaccgtagcgctcactctgaatggtcgtctaaaaatgaaattcatgctgaactaaatgcgattttgtttgctgcacgaaacggttcttcaattgaaggtgctactatgtatgtaacactttctccttgcccagattgtgcaaaagcgatagctcaatctggaattaaaaagctggtttattgcgaaacatacgataagaataaacctggctgggatgatattctgcgaaatgcaggtattgaagtgtttaatgttcctaagaaaaacttgaataagttaaattgggaaaatatcaacgaattctgtggtgaataatgaaatttcgtttggtacagctcacagcaattagttcttattctaacgagaatatttcatttgctgtagagtataagaagtattttttctctaaatggaagcagtattataagtcaaactgggtttgtattgataaaccgtatagttggaaatctgatctagaaaaatgccaaaaattgctttccactcttaaagaacgtggaacaactcatattaaaactgtgataggtaaataaatgaaactgacaactgaacagaaagtagcaattcgtgaaattttgaaaactaaattgtccatgggtatttcaaacgtggtttttgaaaagtctgatggtactattcgtactatgaaaggcactcgtgatgctgactttatgccaaccatgcaaactggtaaattgactgaatctactcggaaagaatctactgatatgattccggtatttgatgttgagctcggtgcatggcgaggtttttctattgacaaattgatttccgttaatggcatgaaagttgagcatttgcttcaatttattggtaaataaatgctttaagaattatttgttattattaattcatctgttaacaaaaaggaaaaacgatgtctgaagtacaacagctaccaattcgtgctgtcggtgaatatgttattttagtttctgaacctgcacaagccggtgatgaagaagttacagaatcaggacttattatcggtaaacgtgtccaaggtgaagttcctgaactgtgtgtagttcactctgttggtcctgatgttcctgaaggtttctgcgaagttggtgatttgacttctcttccagttggtcaaattcgaaacgttccgcatccttttgtagctctgggtcttaagcagccaaaagaaattaaacaaaaattcgttacttgtcactataaagctattccgtgtctttataagtgatataaataataatatgaattgggtgtcggaataataagttaaccgaacaattctacgtggtagtctacaactgagagatctgtcgaaagaagatgaaattcagaagaacgtgactaccgagttttaatctctaacgagaatttttaaatgattaaacaattacaacacgctcttgaactgcaacgaaacgcatggaataatggtcacgaaaactatggcgcatctattgatgttgaagccgaagctcttgaaatcctgcgttatttcaaacatctgaatcctgctcaaactgcattagctgctgagcttcaggaaaaagatgaacttaaatatgctaagcctctggcttctgccgcacgaaaagcagttcgtcactttgtggtaacactgaagtaatttattggagagtcactgccttagtgtgaagttaaaacgaggagccgtcgaactttgttttgcggtgtacctcttgaatgttgacgaggtttatggttatcctgtcggtaaatattcaaaacctaagtaccccttgagggctttcgcaggcaatgccaataagtcctgcattttcatttaaaagagaatttataatggcaaaacaagctaaagcaaagaaagcagttgaaaagaaagttggtgattctaaacgcgctggttacaagcgtgggtcgaactctcgtatcaatcaaactgttgagaagatcatgcgccgagcacgtgcggttcttcgagatgatgcttctcgttttggtaagcagaaagcataagttgaggactccttcgggagtcctttttattttccaaagattgcacaaagttgtttacagtatggctcctttgtgatagtattatcttacacaaacaaaggagaataaaatgaaaatcaatcttaactcatacatcaaaggtaaagatcacgacggctataaagctatcgaaactaaagaacttcagtggcatttatataaagaacaatttgaattcgtagattgtatgactcctgaaggtccttctgatgatttctcttggaaaataatgttaactaacttttttactggagatacatacgaattaaaaactttgattcttggtaaaattcgctgtgagacttatgaagataaagaaactggttactctgaagatgttacgtggtatcaaaatggtcgtattaccgctgacctcttgattgaaaaaatgaaagccaaaggtgaattaaatttagataattggattaaagttgcataaaatagtttactttggtacaggatatgatattatatacctgtaccgcaattaaacatctcggagaataaaaatgaactacatcaactttgaacgtaaatatgtttctaacggtattgcaggttctattgatactatctgcctttggaaacatcaaaatggatcagtatgcgaaattgagcagtatatgactcctaattacgtttatatgcgatttgaaaacggtatcacggtttcaatcacaatggaaggttccaactttaaaatcgctctggatgatgatttccgtcaacgcgatttagggactcatccttgctggaatggtgctaatcgcaagcttctggttaaaacttggattcgtcatattttgagtaacagagctaaacctgagcatcttgaagcaatctttgatgtagttcttaacgaatttgatatttaaaataaaatgaggggcttcggccccttactgaggaaaatactatgtttatgactacttattttgatacccgcaaaaatttctgtgaagtggttttctctaaggcacctaaagaccttcctgctcatttgcagcctactagtgaatcgattaaaaactatgttaatgtagtctgccctttagagttccgtactgtaaatggccgcgatactttagctatcactaaacttaatcgtgaaattgacattgacccttcaattgcgcgtgaaattaacatttctgatattggcggcggtaatgttaaatcgcatggttttcagatgaggttctaatgaaattctttttaggtcaaactgttgaattaaagggagttggtatacctggattaatttctaaggttctacctccatttaaatggagtggtattcaaataaaagaggcttatattgtttcctgggtagatggaaatgaagaccttcgtatgggtgatgaattatctcctatttacggattaaaggaattagtatgaatataattaataagatttttggaattcagtacattaaggtcacatataaagtaacgtataaaggtccgtataccgatgaatatgaagagccacaagttcagtctattatattagaaaaggatcctaactggccagttgaatttcgtcttccttgctatggtcattgggctgatgttgaaattataagtattgaaaatgtctgagctagagataagaagcaattttagatggccatcatgcgcattaagtaatttcgcccaatggcctttcgttatggatggtatccaatttggaggtctcgaaggattcctccaaggatgtaaggtgaaaaatgttgaacagcaacgtcgtatatttgggttatccgggcttgccgcccaacaagctggaaggtcttatgctagagctcaggaccgtgggaccctcttctggcttggagttccgttttcaagatactctccggcgtggaaagaattatacacaaatgcatattttgaagcagcgttccaaaacaagggctttcgcgatgcattacaagcctcgaaaggaaaagttttgaagcacagcatggctagtggtctaacaaaagatgatacaatactaaccgaagctgaatttattgatgtgttaaacctattaagagactctctatgaagcctactattttgactgatattgatggagtatgtttaagctggcaatcaggccttccttattttgctcagaaatataatcttccgttagaacatattttaaaaatgatccaagatgagaaatttatttctccgggtaaactctttaattgtgatgaagaacttggtgtcaagttaattgaaaaatataatcgttcagattttattcgttatttgtctccatataaagatgcactgtgtgtaattaacaaattaaaagaagattataattttgtagctgttacagcattaggtgattctattgacgctctgttgaatcgtcaatttaatttgaatgctctttttcctggtgccttctcagaagtaatgatgtgtggtcatgattcttcaaaagaagagttattcaaaaaggcaaaagagaaatataacgtaatttgttatattgacgatcttgctcaccattgcgatcatgcgaatgaaatattaaatgttcctgtttattggatggcgcgaggagagcgtgacaatattccaaaaactgctcagcgagtttatacatggaatgatgtagaaaataaacttttttcaccgaaggaaaataaagaaagttttgatagtgaaaaagctataaaagatgtaattgagaagatggttaaaaacgattcttttcgttggaacactacctggagaactcctggatttaatccgtataatccatattatacacatccatataatccatattatacacacccgtatcatatgaatccattccatacgtggagttatactaagcctggtgatgcagggtattttaatagatttactagtggtgataatattttccaaggagcattctaatgtttgtcgttcacactatttatgaaaatgaaggtaatactacacgtgattacggtcacgtaaatcaattctttagatgcaatccagaattccgagctcaaaaagacgaacgaatttttaaaaaatgtgtagagcaaggtttcatttatatcaagcactggatgcaaggaaataaagttagaactacatatcataggtctttaactgagcttaatgatgaattgatttataatagagctgtaaaccaaactctaaaggatgaacaatgattcttaaaattctgaacgaaatagcatctattggttcaactaagcagaagcaagcaattcttgaaaagaataaagataatgaattgcttaaacgagtatatcgtctgacttattctcgtgggttacagtattatatcaagaaatggcctaaacctggtattgctacccagagttttggaatgttgactcttaccgatatgcttgacttcattgaattcacgttagctactcggaaattgactggaaatgcggcaattgaggaattaattggatatatcaccgatggtaaaaaagatgatgttgaagttttgcgtcgagtgatgatgcgagaccttgaatgcggtgcttcagtatctattgcaaataaagtttggccaggtttaattcctgaacaacctcaaatgctggcaagttcttatgatgaaaaaggcattaataagaatatcaaatttccagcctttgcgcagttaaaagcagatggagctcgatgttttgctgaagttagaggtgatgaattagatgatgttcgtcttttatcacgagctggtaatgaatatctaggattagatcttcttaaggaagagttaatcaaaatgactgctgaagcccgccagattcatccagaaggtgtgttaattgatggcgaattggtataccatgagcaagttaaaaaggaaccagaaggcctagattttctttttgatgcttatcctgaaattagtaaagctaaagaattcgccgaagtagcggaatctcgtactacttctaatggaatcgccaataaatccttaaaaggaaccatttctgaaaaagaagctcaatgcatgaagtttcaggtttgggattatgtcccgttggtagaaatatacggtcttccggcgtttcgtttaaaatatgatgtacgtttttctaaactagaacaaatgacatcaggatatgataaagtaattttaattgaaaaccaggtagtaaataacctagatgaagctaaggtaatttataaaaagtatattgaccaaggtcttgaaggtattattctcaaaaataccgatggattgtgggaaaatgctcgttcaaaaaatctctataaatttaaagaagtaattgatgttgatttaaaaattgtaggaatttatcctcaccgtaaagaccctactaaagcaggtggatttattcttgaatcagagtgtggaaaaattaaagtaaatgctggttcaggcttaaaagataaagccggtgtaaaatcacacgaacttgaccgtactcgcattatggaaaaccaaaattattatattggaaaaattctagagtgcgaatgcaacggttggctaaaatctgatggccgcactgattacgttaaattatttcttccgattgcgattcgtttacgtgaagataaaactaaagctaatacattcgaggatgtatttggtgattttcatgaggtaactggtctatgaaagcttacttagaaacaattgtcattgctcaaaaagaaggtggagatgtttctacttctgtatcacaaattatgattgaatttatagatgcatatgcttataataaattcacagaaacatttgatgcttatgaaaaaggcccaaagtttgaaatatatcgtactctcttaccaatagattattaaaggccttcgggcctttaattttataaatagaataaacactagagaggatatgatggaactcattacagaattatttgacgaagatactactcttccgattacaaacttaaatccaaagaagaaaataccacaaattttttcagttcatgttgatgacgcaattgaacaacccggctttcgtttatgtacctatacatctggaggtgatactaaccgtgatttaaagatgggcgataaaatgatgcacatcgttccttttacattaactgctaaaggttcaattgctaaattaaaaggtctcggtccaagcccaattaattacatcaattcagtttttactgttgcgatgcaaacgatgcgtcagtataaaattgatgcctgcatgcttcgtattcttaagtctaaaactgctggtcaagctcgacaaattcaagttattgctgatagacttatccgtagtcgttcaggtggcagatacgtccttcttaaggaactctgggattatgataaaaagtatgcatatattcttatacatcgcaaaaatgtatcactagaagacattccaggggttccggaaattagtaccgagctctttactaaagttgaatcgaaggtcggcgatgtttatatcaataaagatactggtgctcaagtaactaaaaatgaggcaattgcagcatctattgcgcaagaaaatgataaacgctctgaccaagctgtaatcgttaaagttaaaatttcccgtagagcaattgcacaaagtcagtcattggaatcttctagatttgaaagtgaattattccagaagtatgaatctactgcagctaatttcaataaacctgctaccgctcctttaattcccgaagcagaagaaatgaaacttggaattaattcattagcttctaaaaccaaggcagcaaaaattattgccgaaggaactgcagatgaacttcactatgattataaattcttttcaaaaagtgaggttaatgaagtttctgaaaaaattaaagatgtaattcttaatgcgattaaaaatgaaccaactacttcaataaaatgtttagagaaatacgcagcagctgttaatcaattctttgaagaatataaagataattggcttgataaacataataaaaatcgtaaagggcagccggatgaagtctgggaagaaataactaaaaattcctggaacgcagcaaaaactaaattcctcaaacgaatgatttatagcttttctggaattggtgcaggtccaatgattgatattactattgcccgtgatggttctaaatatactccatcacaaaagcgcggcattagagagtattgtggatcaggatatactgacatcaataatcttcttttgggtcgttacaatccagaacgatatgatgtaatgagtgaaaaagaaattgaatctgcgataaataatttagattcagcctttgaaaatggtgaccgtataccagaaggcattacagtttatcgtgctcaaagcatgactgctcctatatacgaagcattagttaaaaataaagtattctatttcagaaattttgtatctacttctttaactcctatcatttttggacgttttggaattacacatgctggtattggtcttttagaaccagaagctcgtaatgaattgacagttgataaaaatgaagaaggaataactattaatccaaacgaaataagagcgtataaagaaaatcctgaatacgttaaagttcaaataggatgggcaattgatggagctcataaagttaatgttgtatatccaggaagtctcggaatagcaacagaagctgaagttattctaccacgcggattgatggtcaaagttaataaaataactgatgcttctaataatgatggaacaacatctaataatacaaaactcattcaagctgaagttatgactacggaagaactcaccgaatcagtcatttatgacggtgaccgtctaatggaaaccggcgaagtagttgcaatgacaggtgatattgaaatagaagacagagttgactttgcatcatttgtttcatcaaatgttaaacagaaagcagaatcatctctcggaattattgcgtcttgcatagatattacaaacatgccttacaagttcgttcaaggataaatcatggaacttattacagaattatttgacggcgcttcggcgccggttgttaacttaaatcctaagcataaaatacctcaaatttttgctattcaagccggtgaagaaagcgtgcttcctggatttagattttgtacatacacctctggcggtgatacgaataaaacgttaagccgggcgataaaatgatgcatatcgtaatgataggtgttaatgagaaactatcattagttaagcttaaaaacttgggtggaaatccaattggtgtcattaatgctgtttttgatactgctcttcaaacaatgaaacaatacaaaatcgacgcatgcctattacgcgtactaaaaagttcaaaatgtagtttacaagtccctcgtgttgtgttatagtaatcttactgacataacatgaggaacacaaaatgaaatcttctttacgctttttaggtcaagaacttgtagttgaaggcgttattcctgctgataacgcttttaatgaagcagtttatgatgaatttatcaaaatttttggaacagataaaaagttcggaatttttccttctgaaaatttttcaaagccacagcagactgaaagcattttccaaggtgtagtaacaggtaaatttgagtcagaagctccggtaaaaattgaagtttatattgaagacagtttagttgcttcagttgctgctttcatttcattccgtaaataaaaatgtggggaccgaaaggtccccattgttatattgctcctaatattttactctgcgaattgacaatccctgtcatagtattaatgtttgaaatgcttcctgcagttcctcctaatctactaagtcgtgaaagcgaattagatagtccagtaacacctccactatttccgagaacgctttgaataccatttatagcagcagattcaagccattcaagcgcagcttgtctatcaaccgctccagcctgcatgactctatacgcaaaagtaacatcaaatgtagttatttggttatctccatcatatgataactcaggagcgctcactgatattggaatgcatccagtgaacatcaccgcagtatgaggtaatccattacgagaatgaagattaacctgaatatctgcctcgacatcttgtggcaaagcacgtaatccagttactgggtcttgaacggagttaacccagtcttgcattgcacgatagttacaagcttctgaatccattctaaatgaaataaccaaagggtccaattctctcccagttatacgaatattaggagagttataattccagtcagtttcataggataatctattctctggcatttttacagagtatatcatcaatccagatgaattatatgccatattaaagaagtcaattaaatatgtaccaactgtaaatgagcccaataaactttgaactgtacgttgactcatggcaccaataagatatttactaacccctgattttcttatcagtttttgtgtgccagcagtaattagcgtggtaattccctgattaatatcgccttgagacaatcctaaccagtctgaatttagacccaagttattataagaaaagttgctaattgaacttatcaacgaagagcttttagttgatggagttgtcgcaaaaacgcagctaaacatattattacgttggaaatctgcgtttattgcttgattattaaattcctctaaagaatacattaaaaagtccccgcatataaagaagcacggtttaacgtgataatttctctcatagtaatctcaagagtaaatgtactagggaggtttggagcaatagctaatccgttaaagttaccattaggtgttttatcaaatctgatactctgtatttgacatggaccaaatatttccgtttttccatcaaacttagatgttgcaccaaagtttttcaccatccaaattgtcgggtttgaaactactagaacgttagttaaactcgatgtcattttctcaaatagtgttttatttttagctgcgtcttccggagataaaggttcaattaatgtagaacgataccaatcatctaaatacccttttatttcagcagcatattgagatttgcccgtttcaccataagaaaaatagttaaaatactgatagatattaataatagccattaaatcttctgttgaacgtggagtcaaatcccatgtaaacactttagttctattctcagcaccaccatacatacttctggctgtagtataaatctgttcattattatcagccattataccttgtgttatactttccagtgccccaaatactgcagttgaagcaatattacttagcacaccagtagcagttcctccgcctctactgataagactttcttgaacatcattaaatctatgtgatgatgtatcaacgtcagatttagatctcggtaaaagaatgtttgcgataggagctttacttattgttcctgaattattgtttgatattaatccatttgatagttttgatactgtactactaatagtgtttctagctgtacttaaaatactcgaagatgaagaagagtagttagatctcatcgatctaagacttccagaatccctagatgacatattgtatgcagtaaataataatccattcttatatagatctgttacctggaagtcccctgtagtgtcattaccactagcacgcccagttggaaactgggcagtgtatgttttagttgctacttctgatttagtactctgtccggctgaaattttctcaccggactttttaattaaatcagcagttatttctttaacaattgccatattattccttaattaactccggtcgcatcaaatacaccaggagcagtcgtgctcgttacgggtgtcatattatgaacgacagtatttttcttaataacattattagtattgttgattgaaggagatgcttgttgaacaggagcttgctgtgctttgttcttttctattacctggacttgttttgcttctggcgatttagcagaagtttcaggtttggcattaggctgatttttcttgagctcttgataagtagcatcaattttagaaaatctagcagcaagttcttttttaactgccggtgaattatttaaatccgggtcatccatccgttttttaaggtcttcataggcagcttcaactgatttaaccgttgagtctttactcatatcagctgaatcagcatatttttcaaaacgaatcatcgcggcacgggcttcattagccttcattaaagcattttttctttcttcaggtgaaagttgctttaatttttcttcttctgctgcgcgttcttcatcggttgtcaatgcttctttattatcaacgccacgaatccagttagatgcacgagttttccaattagcaattttatctaatccttttgctatcggaccaaggtctccgttcattcgtttatcttgataatttgcaactttttcctggtcttctttattgagagatgctccagtagaattttggaaattttctagtgctcttccttctacttcatcagcggtatccttcatgccaggaatgactcgaagaattgcagcagataatttagccattccaagctgaataagttctcctaaattataaagaacctttccaagcccttctacaatagctaccgtcaaaccgccccaatctccctcttcccaaagttgtttaattttatcaatagaatcaaagatgctctgtaataaagggctccatgttccggtttcgctagagaatttagtaaagtttgtactaaacaaatcccaagcctgtgaaaatttatctgaccaatatttgaaatgaaccatcagcaggtctattccgacaacaacagccaatatcattgcagtcattttagcagcttcaatagcagcactgatggtgtacttaaataacatgcttgatattttatcagtaattgaaatagatttcttaaatccgaaatcaacagtctttgttaatttatctaaagcttgagataattttaagttaaatgcatcttttttctgtttttcttctggcgattcttgtttaggttcaactggctgaggggtagggaaaaaatcagcatcaggatcattattaactgcttcaggagccggtaataaaggaccaacagattcagctgtatcgtcctcaacaactttaacaggaatagcgctttcaaccgtggctaaactagttccagtctgttgaattccagctgtctgaattttttgctctagtaaacttgttaatttatctaatttgctcccgagtgattcaccgatttctttattaatattgttgccaatttcaacagtttcagcaattaactcagaaccagcagtagtatcactcactgcgctttctacattgtcaattgctccaattatttcattcgatttttcttcaacagtttgagcaattaattcagaagcagcttgagcatcatccaatttcgtagatatatcgttaagtccagataaagtgttagaagcggatttagccgcttcctgtgttggtttattatctgaaataacttttctgcgcatcgtttgcatttcttgtggctttttcattcaaataatccaataatattgccaattccggttattggaccattagggccaggaattgctaaagttgtaaaaatgtcatttgcccattttaaaacgaatgctggcatctcaagaaaattaatttctttaacttcatcattgaccttaagtaagcacttggataacatatcgctcaccgttaaaaattgttcaaattttccaggaggtctaaaataaaatgtatttccttggtattgaaattccaatctttggcatacataaacatcattaatgtcataagtataaccatctatttctttgcgagatttaatctttccattaaattccaataaatgaatagaaacgaaatcaacttctgccggtgataaattcggacaaatagaatcgatcaaaagttttaaattttcatcaggacctttaacatcttttaaaatgttataatgtttaagacccattttaggaatagaaacttctttattgcttattggaagaactactttcttcagtggtagtatcagatttaaattcatttttaaccttaactgggtctattgtttccagtttcgttgcattagtgaacatatatagatgagttactgaattattattggataattcgtggataacttcatcaacgtaaaattctgttttaaattggtttttactatcattaaaaataattttaacgccaggtgtcaagttaaaattaccgacagtagaacatttagcgtaaccatcatactgcgccatagtctgaagacgaatagcttcttcatatccattcctataagtcatttcagaataagcacctgaccttgacactacaatagagttttctccctttcctgtagtaatcattggcaatgaagaatctaaaaatgaatgagcatagatagtagcgtttttcattgggtcgcgtttatgaggattcgatttagtcaaccaaacgaaatcatatgctaatggatattttaattcttggatgaattgacctattaaagatggctcaccgacaatcattggatacggttcttgatttatcatcatatcatagtccatcatgttaactcccatgatgtcttgccacacaaatacaaatttgtcacttcctacagctagagcaacttctctaacatacgacaaatagttttcaaatgtgctagtccatggaatatcaggaacataagcatttatagcatttattgctggagttaataacgtgcgatcctgataaatgacaccaagcatttcctttatagattcacctgcatcagagaaaaacggtctgccaaatttaagattttctatagaatgaatagttcccaattcaatagcaatgatgttatcaccttttgaatctactgacacggaaaaatgcttacatccataaattcgtgttttaacattattaatatcatttgcattagctacagaaatctgaattatttcatttccatccatttttgtatggatgtttttagaatcataaaactgcagcattccttcatttcggccataaagagaatcccgcatagttaatgtagtaatagtagcagctaattcaacaaatctattattactccaagcgtcgtagctatcaaataatttaacgctgagatttggatatccggggcgttgcaacatactcattattgtttatccttctcaatcagttttaatacgaatccgcgctcagcaggaatcattttcattattgaatttaagctataattactttttacgagtgtgtgattaatttgataaaaagtaaatatttcatctgggttaactaatagcttaaacacatctactatatcagtgtatttttttacatacttattacaacacgacatgtgcaatgttaaattaataggattcattgaatcgagaattttttctaatgtttctatctcgatggcatcaacaagttctatttgacttgattcactaatttccttccaatcataccacgtttcatctacttggacagaatgaatattttcagtaatcatctttgctttattttcataaaactcagaaggaaactttaatttaattttaacattagctacatcaaaaacaggttcctttaattctttttgatatatttcaaatggaactgtcttttcttttttacattttggacatacaaatgtgactggtactttagttttacctattgaccctacaaatacctgcaaaaatataaatggttgccaagtctttggataatctccaaaataatcagcaattaaatcagcaattacttctttttgttcttgtggtgaccgatgttctatatcgtttcgaactaacaaaaaatctcgataatcttctaccgtaaatggtttaaaacgatgaacaccatctggtaatttacaacgaataatgtttgccatagatgctccttttattctatttataaatatgataaataaaggagctaaaatatgtatgaatacaaatttgatgtgagaattggttctaaaataatcaattgtcgcgcattcacgcttaaagaatatctagaacttattactgccaaaaataatggttccgtagaagtaattgttaaaaagctaatcaaagactgcacaaatgcaaaagatttaaaccgccaagaatcagaactattgttgattcatttatgggcacattctctcggtgaagttaatcacgaaaactcctggaagtgcacctgtggaactgaaataccaacccatataaatctattacatacacaaatagatgcaccagaagacctctggtatatactgggtgacattaaaattaaattccgataccctaaaatttttgatgataaaaatatagcccacatgatagtatcatgtatagaaacgattcatgctaacggggaaagcattccagttgaagacttaaacgaaaaggaactggaagatttatattctatcatcacagagtcagatattgtagctataaaagatatgcttttaaagcctactgtttatttggctgttccaattaagtgtccagagtgtggaaaaacccatgctcacgtaataagaggcctcaaagagttctttgagttactataatgtcaaatattaataagctttattctgacattgacccggaaatgaaaatggattggaacaaagacgtttccagatcgcttggattaaggtcaattaaaaacagtcttttgggaattattacaacaagaaaaggttcaagaccgtttgaccctgaatttggatgtgatttatcagaccaactttttgaaaatatgactcctcttactgctgacacagttgagcgcaatatcgaaagcgcagtaagaaactacgagccacgtattgataaattagcagttaatgtgatacccgtttatgatgattatactctgatagtagaaatacgcttttcggtcatcgataaccccgatgatattgagcagataaaactgcaactggcttccagtaatagagtataatgcttcacgtataaacgtggtataatgaatctaagtccatccaataacaattgaatagagaacaatatgagattagaagatcttcaagaagaattgaagaaagatgtgtttatagattcgactaaattacagtatgaagcagctaataatgtgatgttatatagtaaatggctcaataagcattcaagtattaaaaaggaaatgcttagaattgatgcgcagaaaaaagttgctcttaaagctaaattagactactactcgggacgaggagatggtgatgaatttagtatggatcgttacgagaaatcagaaatgaaaacagttctatcagctgataaggatgttttaaaggttgatacttcattacaatattggggaattttattagatttctgtagcggagctcttgatgctattaaatcacgcggatttgctattaagcatattcaagacatgcgagcatttgaggctggaaaataatgaaatatagcattgatgatgcttttaattatgaagaagaattcgaaacggaaattcaattcttaatgaaaaagtataatctcaagcgtcaggatattcgtatcctggctgaccacccatgcggtgaagatgtactttatattaaaggaaaatttgccggatatcttgatgaatatttttattctaaagatatgggcattgatatgcatatgagagttatataaatagatatataatttagaggagacaatcatgtcagataagatttgtgttgtctgtaaaactccaatcgattctgcattggttgttgaaacagacaaaggtcctgtacatcctgggccttgctataattacattaaagaactaccagtttcagaaagttcggaagaacaattaaatgaaacacaacttttgctatagtgtgacctttagtctatagttttggcccttccttttttggttgggccttttttaatttaaaagctttcttctacttcatcgtctgaatcttctaattcagctctttttcctgccaaagcatctctcacggagatgtcatcagtatcttttaattcagtttctttaactcttttcttataataagcttcaagttcttctagaccttctaatgtttggcaagaggcaattttacccataaattcatcaatagaagcttcataaagaaattgtttaaattctagtaacatctttttctccaaagggccgaagcccttataaattaactgttttcattacgtaattaaatttttcatctgcgtagcgctgaatacgatcaatgccgtgttttaaaagatagttcaaatgaacatatttctttttcgtattagcagattttggcttaacaccgcaatcatctatgaggtcccagaccgttgcgattgttttagaaccatgcttacgtaatacgcgacctattgtttgcaatacaataattttagatttaacaccgtgtgctaaaacaacgtgatgcagatttttaactgaaataccagtagaaaatacaccataactagctactataattattcctttaccgttttcagctaaggttttcattacgttgcgtgtttcggtatcaacttcccctgatacgtaataaactttatcgtattcatttttaattaaatcgaaaatagctttaccgtgtgatacgtgtttaaacatgacaaaagcgttttcatctttttgcgcaagcttaatagctaatttagcgatccatttatttcttttactgagcccagtaataatttttatttcttcttggtaagtttttccctttaatttagtagtgaactcatcgggatagcgaagaaaaatactattaatttttaactcagttacttgtccatcttccattaatttagaagtcgttactggcttaaatatttcaccaaacattccaacatactgcatgatattagctttgccatcacgcaatgaaccggacaaaccaaatttaaacatgcagttatttaaacctgatatgatagatgaaatactttttcctgtagcaagatggcattcatcattcatcatcattccaaactgtgagaaccattctttcggttgtttaactacagtttgccatgtaccaacaacgactggtgcatcatttttatatttatcatcttttgatgctccgccaccaattttctttatcattgcatgactgaataaacgatagtcaacgaagtcatcagccatctgagttgttagagcagttgttggaacaatgataagaattttaccttcgtaattttccaaataataccgagcgagcagagcctgaattaaagatttaccagcggatgttggaagattaagaattctacgacgattaactaatccttcgaacactgcatctttttgataccagtgtggttcaattcttttatttcctgaatagatttctaatttagaaagccattcatcaaaatcttttcttgataattcttctttttcgttaatttgtgggtcaatccaggctttatagccaaagttatcacagaactttttaatttgcccgactaagccgaatggaagaagacgattataatctaaaagacggattcgtccatcccagttgccatatctgaagcgaggattaaacctatatccatcggcctcaaacgaaaagaaatctcttaattcgtggaacgtgctctcttcacaatcgatgcgtacatgactgaagtcgtgaaaatgtactttaatatccataattatgccttactaaatttgcctttagaatctcttttcatgagacgacctttaataaatccgtcgggaataataccgtctggttgtattaatttatttattgcaccattattgacccaaaaagttcctgtggtagtcggtttgactttacatccttttctggactttctattaggatgaaccatcccttttgcaaatccttctggaacaagttctccaggtttaataaaaatatttttagttccattagtgtaacaagttttacctaataccgtgcccggtgagttttcaaatcttttagcggaagattctttcatctttgttataacttctgtagtcataacaattccaccaattccaccaggtttcatattataataatttttgctttttattagttcaggagttataatttcttcttcatacatgtacgcttcttcggaagttttaaactcttttagtattgttctagagaaattgttttcaccatatttctttatagcctgctgaattgccttaccagaaccaaggtaaccatcattcaagtcatcagtagagtgttttcctatatactttttaccatttattagatttgttgtttcgtatacaaagtggtacatactattttccgagtaataaatatatctatatttatactgaggaaatattatgatagataaagattatattgcagagctgaaggctcttgatgataataaagaagctaaagctaaattagctgaatatgctgaacagtttggtataaaggtcaaaaagaataaatcttttgataatatcgttgctgatattgaagaagccctccagaagctcgctagtgaacctatgccagagactgatgggttatctattaaagacttaattgatgctgctgatgctgcagagggattaaaatatgacgatgaagaagttaatccagaagcagcacttctgattgattctccagttaaatctgatattaaaattgaagtggtagaaacggataaaattcctgaaaataccgatgttttgattgaagatactccttttgttgaagaaaaattcgaacaggctgtagctgagattattgaatctgaaaagccgtctgtatttactcttccggaaaactttagtccgaatcttcagctgattggaaaaaatccaggattctgcactgttccttggtggatttaccagtggattgctgaaactccggattggaaatctcacccaactagttttgaacatgcgtcggcacaccaaactttatttagcttaatttactacattaaccgtgacggatcagttctaattcgtgaaacacgtaattcttctttcgtaacattaaaataaggataacttatggcttttacagttgatataactcctaaaacacctactggagttatagatcagactcagcagtttactgctacacccagtggtcaaactggagatggacctattacatatgcttggagcgtagataatgttccacaagatggagctgaagcaacttttaattatgtattaaaaggacctgctggaacaaaaacaattaaagttgttgcaacaaatcaagttgccgatagtagtcccgaaacagcagaaattactacgactatcacggttaaaaataagacacaaacgaccaccttagcagtaactcctgatagccctgacgctggagtaatcggaaccccagttcaatttactgctgccttagcttctcaacctgatggagcatctgctacgtatcagtggtatgtagatgattctcctgtggacgaagcaactagcgctacattcaattacactcctaccacaagcggagttaaaaaaatcaagtgtgtagctcaagtaaccgcgacagattatgatgcactaagcgttacttctaatgaagtatcattaacggttaataagaagacaatgaatccacaggttacattgactcctccttctattaacgttcaacaagatgcttcggctacatttactgctaatgttactgatgctccagaagaagcgcaaattacttattcatggaagaaagattcttctcctgtagaagggtcaactaatgtatataccgttgatacctcatctgttggaagtcaaaccattgaagttactgctactgttactgctactgattatgatagcaaaactattacagcagaaggtcaagttcaagtgactgataaagttgctccggaaccagaaggtgaattgccttatgttcatcctcttccacaccgtacttcagcttatatctggtgcggttggtgggttatggatgaaatccaaaaaatgaccgaagaaggtaaagattggaaaactgacgacccagatagtaaatattacctgcatcgttacactcttcagaagatgattcaagattatccagaagttgatgttcaagaatcacgtaatggatacatcattcataaaactgctttagaaactggtatcatctatacttatccataatcttaggggcttcggcccctttcttcgtttttaaagcatacaaaacacatcttgagattgatgtatataatggcacaaaccaaataatacgggattgattatgagagctgaagttgaagtttatacattacatgaggcgggattttcattcgtagaaattgctcaaaaaatcggtttacaacctaaagaagttggattactatggactaaagccgagacagctcggtcaaagtttaaagcaaaagaaaaagttgtataccgtaaacgtctgattaataaaaaggtgaagaaatgagttttgcacaggaattaagagaaagggctctggccactaaagccaatttgttgagtgattttattactaacttctctgtgatggcagagaaagccgctgacaaaggccagacacaatttacatactacccgtcaaagaatgatttaactatcaccgagcaagtcgggcagtggttacgtgataatggctttcaatacaaaattaatcacgaccaacgtgatggacattggatagaaatcaagttctaatatgctttacattttttgatggtataatgaatctaggttctatccattcaaattaaacatcgggtcggagatagagtctctgctaattattttgatattattatttataatggtgatttatgtttaagaaatacagcagtcttgaaaaccactacaactctaagtttattgaaaaactctacactaacggtttgactactggtgtttgggtagcacgtgagaaaatccatgggaccaactttagtttaattattgaacgtgacaacgtcacatgcgccaagcgcacaggccctattcttccagcagaagatttttatggttatgaaatcgtactcaagaagtatgataaggctattaaaggtgttcaagaagtcatgggcagtatttcaacttcagtgccagtgacatatcaaatctttggtgaattcgctggtggtggaattcagaaaggtgttgactacggtgaaaaagatttctatgtattcgatatcatcataaacacagaaagcggtgatacttattacatgagtgattacgaaatgcaagatttctgtaatacgtttggttttaaaatggcgccaatgcttggacgtggaacatttgattctcttatcatgattccaaatgaccttgattccgttttagccgcttataatgctactgcgtcagaagaccttgtcgaagcaaataattgtgtatttgatgctaatgttattggcgataatacagcagaaggttatgttctgaagccttgtttccctaaatggctgccaaacggtactcgtgtagctattaagtgcaagaactctaaattcagtgaaaagaaaaagtctgataagcctattaaaactcaggttccattaaccgaaattgacaaaaatttgcttgatgttctagcttgttatgttacactaaatcgtgttaacaatgtgatttctaagattgggactgtaacgccaaaagattttggcaaagtgatgggattgactgttcaagatattctggaagaaacttctcgtgaaggtattgtattaacatcatctgataatccgaatcttgttaagaaagaattagtccgaatggtgcaagatgttctgcgtcctgcatggattgaattagtatcataacgaaaaagggacctttcggtccctttttattaatctacaataattttaggcaatttaacaccgagtaaaacagacaagtctgaacgtcctgccattttatccatgtccccgccatcaattactctcgcttctttttcatcttttgctactgtgtaaggatttgctgataaagcatatctaaccaataaacctatagacggttgtaagctttccggatcaactacaactttaaatgcaccgacatgttccgggtcgtctaaatccattccttcagtgtatggagcataaaagatggaccctacaatctctttttcgccgatattttctactacgccaacgattacataatctaatgggctgttagtatcgcaataaagcggtaaaccattagctaagaacccgtaggcattttgtgaaagatatttatcatcttctggtttatgttttaaccaacctgatgcagcaagaatcgcagcggcacgagctgaagcaacacagaacgttgctgtataagttgattctttttggatatgcgaaaccatttcacataccattcggtataatgaacgaccagcttcaggagcagatgcataactcaaatcaatgaatccagtatcagtaattcctgtaactttatagcgttttgatactgtaatcaaagattgcagaatatctttattgatttcatctgccatttcagttgcaagcaaatcttccaagaaattaggagcatcgaatccatttgcttctaaatcttgtgctaattcaactgtgatgccagttttaagtttgcgagatttaactgcggtttgccatttattaatctggaatctagcatccgcaatttcactatcagagctttcaaatttgcttgttgacgctgcgtcagaaaatagacgaacctttaaaagaacaattgcaatctgaagagctaattctaaatcgctttcttcaatggtagcaaatggtgtatcttctaatactttataaacgatattattatatttgaataaatcgcctttattgagagttaatttagactcttctgttaattctgtgatttgttctcggtctacatacccagcttcgccagcataagtagcaccagttttaaatgtaaattcattgtctgggttaaggtatttgataccataaaaagcagcaacaggttgattagttctttgcgttgctacaatgtcagaatatattaatttagtggtagcgcgagtcaaagcaacgagatttgggcgaccgattgagttgctattcgttgtggttgattcgcgcagaagttcgttgattttagccattgtattttccttgttgaaatataatactatttataaagctatttacaagaccaaagtaatatgatattatattcatatacaaacggagcgatgtttaaaatgaaatatttaatatatcaaattactaatatcatcaatggaaaaatttacatcggagctcatgctactcttgacgaaaacgatggttatatgggttctggcgtaaacatcaaaaaatccatcaaaaaatatggtattcataactttaaaaaagaaattctttattctttctcctcatctgaggagatgtataaaatggaagctttactagtcaatgaggaattcgttatgagaactgatacctataatgctgctattggtggcagaggaaatccagttatagttcatttgcaagatccttcatatcgtaatatgttatcaatacgaacaaaagaaggaatgactgtggaagctaaacgaaaaatatcaaaggcaaaaacaggcgttaagcaatctgatgaaactattgcgaagcgagttaaagggcgcaatgaatattataaaacacatgttcatccacgaaaaaataaacctatatcgatttcacatcgtaaagctatttctgaaaaacttggtggtattaaaaaatttattccaatatgtataaagggcgttaaatttgataatcctgattacgcagcggagcattttaaagttagtcctaaaactattcgcaattggataaatgcggatgatatgcctgattgctatcgtataaaatagaaaaagggaacccgaaggttccctaaaattgtgtttctatcgttagagattagatacctttaacatatacacgtctaaagtaagcgttcttaccaaggctgttcagaatagaaggcataccgctctggatgcgagaagccggagcctgagcagcggattctgcaaatgggttgataccgataccgtaacgagttttgaatcccattactggttggaagttcttcggatcggaaccacgcagcggagtcagagctacatatggagcatagtaaataccagcatccatttcgttcggacctttataacctacagtgaaataatcctgtttagcatactggtcgatatatacacggtatttaccacccagaacaccagcaaatactgacttggtagtatcagtgttaaagccagtagccagaccctgtgcagcataagaaatgccggtatcaactgaagccagaacgttaactacgttacgggaagcgataatgaagttaccttcaccacgaccggtctgacgagcaatttcaactgcttctttgtcaatctggaacaacagagctttaaaggattcacctgcccagcgagcaccacgaatatcgattgggtcctggaagtcaaatacaccagctttagaacccggagtcagggtcataccagatttaccaacctgagctgagtagttaatccaatcaacaacttcacggttgatttccagcataatttctgtagccagaatgccagacagttcagcatcagcatccataccgtgaacagcgcggaggtcctgtgctaattcgatagagtaagcagctttcagctgacgagatttagcttcgataacttgtttatcgatacggaagcccatttcattccatgggttatcggtagaaccattgaaaccttcctggagttcagcgatagaagtagccataccttcagcgatttctaccagtgcaccagcttccatttgtttcttaatttcagcatctaatttatctgcatcagttgcgcttgcactaattgttacttgagcagaagcttgcagatacacagtaccagtgtcctggaagaagtgagtatagatatcacctactgtggtttctgtgctagcagccagagctgggaatttcttagcagcaccctgaccagagaacattgcatctggaccatacattgggtggaatgcttctttagcaccggcagcgatcggatctttaccatataccgcgcggagtgcgaatacctgaccggttgggctgctcatcggttgaacaccgcaaatatcgaaagcaatcaggttaggaatagcacgacgtaccatacccataacagccgggccaatctgagttactgcgccagaagtctgacctgcagcgatgttggtagcattgtaaccgtggtcaccaccgatttcagcttctgttaagaaagaaccgaatgcctgagcaattttttcgtctttatattccggagctgtctggaaatctttttcctggttttcaaagattttagcgataatcgcttgtttgctattagcaatttccggtaaaccttcaccttccagtaatggcttccatttgttcaaaagttcagctttagttttgatagtcatttgtgttaacctttaaaattagaaacgagatgcgactttcgcatatacacttacaatatcttctgcaccctgtgcagctttatcttctacagcttcagtgacgaaattcagtccggctgcttcagtatcaggagtatttatactctcagtaatagtgctttcatctttattagatttcttcaccatttctacgattgcactcaatttacttgagaatgcatctgaataatccataccttcgaccagagcagagactttttctttttgagactcagtcagatctttagtactttcgctcaatgccacttcacgctgcacataattgatatatgcgtcacgcttattgagttcttcgaacagacgagctgattcttctttatgttcttgcagctcttcttccatttcagctacaacatcaactgattcttctggaacaacaacgttgtgttcaacaaagagctcttttaatccaccaagcatggattcaaacagttcggctttgatgcctttatcaactgctaatttattttcagcgagccattctttcgcaagatggtcaatgaatttagaagcttgctcagcgattttcttctcagctttttcttcggcttcttctttatttttttctacttcttcttctgctttttcagcaattttagcgatatgagattcagctaatttaacggcgtgctgcttgacggtagcttcgaatacagtgccgaaagtttcttttgcttccggagaaatattaactgattcgaaaatactatcaagagcaacggaagcatcaattttctgcgcttcggcaatcagttgttctttaagcattttgtagtcctgttgtttagataataatatttataacgcttttttcatggcctctgcgagagccatataggcgtcatcggcacttgtatcggcttccgccgtctgtgattcggtaatttccttaggagttacccatgcatctggagcacttggaccccatactgcatcaacacctacagttaatttgaatccttcgtttacgatacgataacctttatttgtgtcagtcaatgaacctaatccacgagaagaaactcctggaatccatccggcacgaatattagctgctaatttatctccaggaccatggtcaccttcaataacacgagctcgtccgtatacgtcatttcctttccaccacatatcttctataatgatagcggcttgcatcgggtcaacattagcgcgtggaggatgatttaattctccgagagcttgtttagttaaaacttgctcattaatatagtcttttaccgctttttctaatatacgttttggataaagacgtttatttctattgacaacttccgcttgcatgaatattccttcgatgtataaacccggttttaaacctaagtcttttccatcatgagattcaagcattggcacgccatcaataatttcgccaggttgaccccaagtttcaattagtaattggggttcattcattagcttaatcctaatgctttacggcgtttaagagcttttttacgcttacgctgagcacgagattgacctgctggattggcaatcttcgttttggtagctttacgagcaatttgtctacgttttgctttagacagcccagtggtttgaaatgcattacgttcacgcgttttgcggtctttagtgcgagtaatttcaccacgggcggaaacatgtttaacgataaattcatttaacggcatattttcattaatagaagctaatgcaaccgctaaatcagtttcatcatcaagcatattctcgacaattgtatttatatcgtctttatttaaagcagaagacaattcgtcaaagcgaccctgtgcttcaggaataagtgcttcgacattctcgagaactaattcatgagtttcagggatcagaagcattattcatcatcctcgtcttcgtcagagtctttgtcttttttgtcgtctttatcatcgctatcttcgtcatcatcttcatcttcatcttcaggttcttcaccttcgattaagaaattacgagcgatagcgattttttcttctttaattaaatcaatcgttcttgcagccatggcttcagcaaataatttacgagcggctacgaggtcgtttgatttaatagcttcaattaaaccttccattaaaaatcctcttgttcttggtcggggtcttggaaacgagcctctttagactcttcttcaatttgcttggcttcttgttctatttcttcatcagtcatctgcaaaatatctttcatagcagttctgtgagaaatatatttaccaataaatggttctgccatggttagcatattaattcttcgttccaaaatttctgcttctttgagctcagcaaagtagctatcccgatgaaattctatcttaatattatttatttcatcattccactcatcttctgtgattatacctttaagcaaaagatttgttttaagcggatctaggaaaacttcttcaaacttgtgctgcaactcacgaataaatttagcaaacgttaattcatcacgtgtaatgctagttccagaatcaaacatcacaccgccttgttggtcttgcggaatgcgtgaaagaggaacacgtaatgccatataaagagcttgtctaaaccaacgaatatcttccatattgccagtattatcagcaccaggaagagtatcaacttctgtcacagctttaccatcacggcgctgcaaccaatagtcttcggtcatagacatattatgctgttgattttttattttacctgttgatgcatcatatactacacggtttttcatcgtgttcataacatgttgcatgtgctcagcagctttacgagcaggcatattacctgtgtctacataccaaacacgacggtcaggagcacgagtaatgcgataaatgactacagcatcttctaataattttaattggttagcaggtttaacagcacgatgcaaatacccgatgatatttttaccgcaacaatcgactaatccagaatgggcataaacgacggcagctttaggaatttttatttttgtgccagcttcatacattctaccatcacatgcatatgactcatgagcagtatcatatataaaatattctttgtaacctttaactatttttgtgccagcttcagtttctgttataatttcacgaacatactgaacttggcgagggtctaatctacgtaattcttttatgccttcttttggacgttttggatcaatgattttatgaaagaaaattcttgaatcaacataccaacgtctaaaatgatcagaaccttttcgttgaaacgatagatgatttaatacatcactaaattcatctaacatcatatttttaatttttgggctaaatttagatttatccaaatttaacgctacgacttcagtatcatcttcatagacgatagcgtctgaaacgatttctgaaactgcattgtccacttcatagttattcatgagattacggtatgtatcaataagctcacgagtagttttcattcctggttcatgtgaaccaaaaattgtttggaatgcagcattataaggagaagcagcttcatttgcgcttacttcaaattctcttgctccatcatcaagctttggggctgtaatggaaacaagatcttctttttcttggtctttaaaatttcgttcgtccattttagcccatggagcaaacaaacttaatacattaaatttcattgtattctccaaatgggaattatagttatatttataatggacttctctgctttaagcaggatggggatttctccccattcattttattcccaataatcgagagcaagagttacttcaaaggtttgaatttcattgtttgaatcccaatctaattgaagttcacccacgttagtaggccatagacctttaatttcaatttcttttgttactgttttagcgtcacgagcatattgacgaacgatagcgctctttttatactctgcaggttttccaccagtaatttcgtttccttgtcccgcagcaatgctttgccaatcaacgaacttctggcgagcatcatgtgcctcatcgttcattactgtaacagtccagtcatcgaatgtacgatcgcctgctacgttaattttacggttcataaatccgactggaattttttctacaataccagctggtaaagcagtggctttacattgaaacgtaaaattttgtccaagataagaaatttctacttggaataagttaggtcgagcaaaatcaccagattcaaacgctcgtgttacatcatctacaaacatattagcctctgtagtatttatatccctatgtttaacctagggcatatagaattaaagaattaaggatatagtgtatttatatggcctgccgaaacaggcctttagaatcattctagtaaatcccaaagatctacgctatttctttttgacttttctcggttagattcccaagtgattatttctaaattttttacacttgctataatttccggcggaattaaattatcaaatccatatttgatagatactttatgatcgagttggtaagcaccttctacaccgcacactcctattttatcagcattcggccattttgaccaaatttttcttattttagctgacttagttatagaatgaactctactagcatataatgcaaactcttttcttttaccagtccatcgaggatgtttatcgcctctttgccatggtctgcttattccggattgaacttccgaatttttaatagcaacttgtttaatgctgcattttctacacgcatgtgtgggtgttctatttaaaagctgaatgcttctactaaatttaataccgcataaatcacatttagcgtcaactattttattactattctttggcattaattctattggaacagatactgtatcatgatatgatacttcatatcctagaattgccgaccacatttttgaatgatttcttggttttattgtaacaaacttagaaataatcacttgtttcctcgagaataggggccgaagccccacaatcaattaacctgcaagaccagttaactcatcgaaatctgcaccagtagcagttgcgacgaaattaagttggatataatttatactacgagccggttggatgtagaatgttgcaacaaactcatttctatcaattactgacggagtgttatttgttgtatcgcaaactacacgatattcataaattccaccgagagctttaattccctgcaagtattgggcagtttctgtgcggaatgatgaacgagtaaacgcgttgtttaattcgaacaaacgatattttgaactacgtccgatattcgttttcaacatattaaacagacgacgaacgttaatacgatcaaatggagaaggaacagaagtagctgttttatcaccatacaatacgtaaccatcaccacctgtaccggttaccgggttgatagcttcttggtataaacggtcgcgctgagcttggcgagtttcaatagccagtttaataacgttaagaatctgaccacgattataaccagctggagacatccaagtctgagatacgttatcagttcttgcgcataaaccagcaatatcagctgctaatggaacccaacgattcacatcattatatttgtcatactgatacttgtagttaccatcaattgctgcgtaggttgaactgatattaaagttattatcagtgtatgaacctgccgcagttctccagttaactaaattatctactgcacgagttacaggaattccaaccacagtttcacgcggtggtgagcacagtactaagcaatcttggcgagcatccccaattgaaacgacgtgtttttggacagtagatgctgtttctaaagattcaccggcacaagaacccgcaataaacaactgaacgtcaacagattcacggtcagcaaagaagtcccaagcttccatcaaatctcctgctgttacttcagcatttgatgataaaccaccagacagagttaaaattccagagaagccttctggccagttttgtgcagttgcgaaaatatattctgaaccaccttttgcgaaaaagtcatcaatatagatgttactatcgtaaatatctttttcaccacgcttcgttgaaagaacaacgctttgaacaatagcatcattgcgacgaactataatagcgtattgtgaatcagtttgtggtccatatccaaacactgctttggcagtagatgcacgtgttccgccacctggataaattgggagtaatgcagaagcaccttttgcgtagtcagctttagatacgatttcaatttcgattttatcgcccaactcgcctggataaagagctactactcctggaattccatatttttcgagatttgcttgaaagtcaacagctgtcatagcagcttcggcattttcaatttcagctaataaaataccagaatcagtaataatttttccaagagttattactgcagctaaaccagaggaagacgaagaaatttccgcagtccagttagaacctaatgctggatattcgcctacttctttcgctttagcgataatttttgcggtaggaatattaattttcttaatttttccatcagcatctacttcggtaattttaccttccgtttcaatgtcttctgaaacatacttaactgtgattttatctccaaccgcgtagttactacctggggtagaaatagtgtattcaatattaccagcaatcggagatgagtttttagcggtatctctatcgacagcgcgcacaactcgcaaatcatttccatattgtaagaaattcattgcagacataaaataatcagcagtttcagctgtaggttgaccaaaagtattaactaaatctacttcatttgtaacctgtttaatctgaaaagcaggaccccactggaatttaccggccaaagctgctgtaccagtagagttattaaccacggtgctttgaaccgtagtttctttgagctcaatgcccggagataataaagtcatttttaatcctctttaatatgctttaatatatttataccattgacataccatgagatactggaacatactcagcagaatgaaccgaatccacaaatataactggcgcgtagtcgtcgctcatatcttgaagttcttttgaaaacacttcagatgctaatcgcatgtcatctttatccgcataatcaataaattttgactgcgttgataaccatccaaaaatcactaaagacattactaaatcgtcatgataaccttcttcagccgcccaagacacgcctttttcactaaacgttctaaactcttgaatagttgcacggtgatgaataataagcttatctttttcaataaggtcttttaatgtagagcatcctactgctttcgttcgtttagtttgcttcattcctaaatcagtatatgaatcgcaaataacgccttcgtattctaaatccatataaagtgatttcgcaactgacacaccagtactatttaattcaatataaactgggcattcattgtattctactaaataacgcataacgatgtcaggtagaattaaatgagaaatagtgtttgagtgtaaaacaccaacctgttcccacacatcatcggtaacatcaataatatgcaaagcgtggtaatcttgcccacgaccttctgagcagtctagagttgcaatatattttctatctggttcagggcttttaaatcgatgaaaaccatgatcatctggagttacttcaatgaaatccataacagccaatttcatacctgaaattaatgtaccagaagtcccttcaaacgctgcagtatgttcttgacgaaattgagctaaagtagaaccattaatggtttgtatgctccattgccatccatcgtcaaaaatatcttcatcattataaagacgttctttaactgaattccaaatagcagtgtatggttcaaaccctgatttaccttcaacagcagcagtccaaatatcataaaaatgatttaatccattaggagtcgtagtaataataattttcgaacgacgaccagatgaaattactggttgaatagcaagccaggaatcatggaagtttggaataaatgcgcattcgtcaatataaatcattgcgaacgagttaccacgaactgcgtcaggagaggaagcgtaggctccgattgaggaaccattatcgagttcaatagaccctttattccattcaacaattcctggctgtaaaaagtcaggaagcagttcaattgcttgtttagtacgatctaaaacttccgcagacattgagcctttgtgagcaagaatacctacagctttatccttgttaaaacatacaaagtgtgcaaggaaaatagctactacggttgttttaccgagctggcgtgatagattacaaacagtcatacgtttagatgacattattttgagcatatcacgctgatagtcacgtaattgaacctttatgacaccatagtcaatatgagtaatagcacagtatgtttctgcaaaataaacaatatcgtctcggcattttttccactcctcaaccatttcacgagtccattgtgttttaatattagctcgtttcaggttaggaagacccatataccgagatcttttattattcttatctttataagtttgaaataattcgggcttatcagaattatttggaatttttactattttgtgtagacgaaggtaatcactgaatttttcaggataccattttccatcccactgagattttatccaatgaattccatcttcatcttttctttcagctaagcttgggtgttttattaaaatttttccagcttcatttaacggatggaaatcatttaatgcattaatcggttgttccatttatcaccttctcacgagcttcttgagcctcgtaagcatcaccaatttcgtccattaattctgttggtgaacccatgaatactgtcgcgttttgaatattcatttgacctgtaggaacagcacctttagtgccaacctgctcagatgtaatatctttcatatctttatgaagcttcagtatttctctgttcgtcgtagtcatttgccccataagagttgcaaatacttccatgtgacgaggagaatcagcattctttgccgtctcaagaaaaatcttggctgcgtccattagcatttgttgttgaaaatgcatatttcgacgaactactccataatcatcttctaagtcaggagtacggttttgaggattgcttttaacttctactaattgcagaggttcatatactttaatttcctccccgtcaattccggggaggtcagaaatatctaaaagtttgtttatatcaagaccttccataataacctctatgttcttgggccaggaggttctggcggtgttggtctatttacattgctagtgaaagtttgttttactgttccatcccagtcttctgggtcaatatctcgaggaacaacttcgctatcgacagattcaaaaacgccttcaccatcaggcaaatctcttgtattggcgtgaaaatctgtataagtagtacgaattaatccttctgcatcatctactggaggatacatccatccatttacttcaaatgttaatgaccactcaattctacgacgagataaattgtccccatctatagcttcgtctatagcagcagacatcagtacaattttaatatcccttttaaatggaatatcatttccaaactgctcgtacatagttgtattaaaatgaggctgaaaatatggaagaatctgttcaactatttgaaacatatcatcttcgtagcgagtaaagatactcaattcataaatcattttaataggagatggattatactgtgatactacagaagttgcgcctttttgcagtaaattctgatttaaaatgtttgttttaaatggagcattatagctaaaatcaactaaatgtaaatttatgcgaggtagaatagtttcaactttagctacatcttcttgtgaatttattgatgtccatttattcaatttcatcatgaagtgttcctttgatgcatacgtaataggaacacgtataaacttatcaccagattctaactgacgtttgatttggatatttgaaaacaaatcgcccatcaaggtagcatatcgtctaaaagacgaattataaaaataaccaaacatgatttctcctaatctgggctttaattagtttataatatttattaatccatgaaatcattatcaaatgggctagattcaaaagatttgcctctgttattgacaacaacataaggttcaacgtattctttagcttcagaattaatttgatctacttcagcatactgatcaatattaatatcatgaataccgttaagattgcgaacaggatttaattctaattcactaaattctggaatgttaattccttcatttttctgtagaactggattaatttcttctccagaataaatgaatttacctgctgtaattttacgaatagcgttttggcctaattgataaaatggatcatatggttcaacccagttgatttcaaataagctgttatccataggaaaatatatcaaatcaccttccttgggttcttttccattaacttgatgcttaaataaatttgggttaatagataaagtcacttcgtcttgtacttgcataccaaagttactaaagaacgatttagctccttcatatccttcaaatgaatttaaatacgcagcaaatttccaagctttagtaaatttattttttaagtcttcgccgaataccaaatcaggggaaacatactctcttggaacataatagcattctacacctcgcatttgaatgctttcagctactaatacatcagctaatatttggctgtttttataatgattgaaatttacataaggatttaatatttcagtttcattggtctgagaataacctgtgcggttttccaatttagcaaaaagatttttatcataagtagccatattaacctacaaaaattccaaatggagggtcaagcaagtataattcttcgcgtagtgcttctttttctaaacgagcttcttctattaaacgttgtccatcaatcgtaacaccgcctggaagcatcattccctggtgacgcgctaaaatttgaccattcaattctttagctaaagctgttgcatagtctttcacccaacgattattgtaagcaccttgcttaacatttggatcttgaccaacaacacgacctactaaattatggtctggattattgtatcgttcagataatgaccaactatcttgtggaccgactgttccatatcctactgtatttccaaccattttgtttgtatcaatgtatgatttagtccagctttctacgataattaaatcgtatttttggaagtttcccatgactttgagctgttcatttgctgaattaaaccaaaagtctggaataggagagagcatatcttgcatcattcccatataactggtaagttgagtaaaataccccaaatcagcaccaaaggcatttggtccataaaatctattacaagacgttcccataccaccattaataccagccattcctaaaagaaagtcagtaaaccacggataagtagcgttaccgtccatagatgttattgatccaacatttgtgcgtaaaatacgagttactgcaaatacgttggaacctcttaaatcaaatactccagtcttatatttttcttcatcgtcccctacataaaacacatgaaaacctttgttgagtccatcaaaatgatattcaccgtataattctagggcacgctggatgcaatcgtagatttgatcgggtgttaactcaacattaataattggagcccctaaacgtcttagaatgacatctttgagttcctttggattctgagaattatatcctgacatttaaaatcctttggggccttgcggccccatgttatgctggtgataaaaaggtagaaagtaatacccattcgccgtctttacgaacgtaagcttgaccatcttttggagcttcaggaatataacctgcttcctgcaaagtctgaacatccccctgtaatgaagatacattacttttaatactacgcatttcttgattaattgaagcaatgttagtctcattagcttttattgaattagtcaatccgcgttcttcgacagttgaaccatttggatttgttccatttactaatttatttaatgctacaacttgtcctttaattccggaattgttattaccaatttcaacttgtaagttttgaacatcattgttcaatctattaacggaagtttcaatagttgaaaccctatttaaaagagacccaggaggagaaggctgacctccactagaatcagttccaacgatttggtttagccatgaaacatttgctcgtagtccagatgaagtgttttcaccaacaattccatttaaaaactcaatagatgttgtattatctttaattcgacctttaatactagaaggaatatcatctgagccaattgatgtttcaatgacagtcaatcgctgtttaatacctccgcttttatttagttcatcatttaaagctgaaatttcttgggtattagtgttaacatctgtgattattgaagtatttcctggatatccaatagaagttttgatagatttaatttcggaactaagattaatttgagattgatctaaattatgcacacgtgaatatatgctttcactaaatgaagatggtctttgtccaagttcttgtctaagatttccgacttcaattgtcagtgaacctacatcagattcaataaatttttcttccaaatcacttagacgtattccttgggaagttatagcatctgtattattaatgatacggtgcttcatacccgtgctgctatttcctacaacaggaagaccgttaatgtcttgcccagcatattgtcctaattcccttttaatccataacaaatcatttctaatcgttctataaactgaatttgcttgcgaattaaatggaccaatgtcagcaagaatgctatcgacagtattattagttccatttaatatttcggtatgttcactcgtaagcgttttaagatcagtgatatcctttttattgatacttatttgcgataaagcttctatatcaccagatacatctaagataccatgaatggttttaatatcttcctgggatgtttctaatgctgttttaagaattcctatattttcgtcaagaacctcaacatttttaaacacggaaacagttggtctattcattgatccatcgtttccatacttagtactagctcctaatatttcttcaccatttttaatccatgaaatacgctcctgaccttcgccaggaacgctatcaacaaaaggtaactcttttaattcaatcatttgtaatccttagtaatgaattttaataatatagtttaatgatatattccatggtctagtttcataaccaattaatccttcacgattaagtgtaccaagggcatctctcggtccacccaattcaaatccatcattagtgaagtatgaagcattatcccagtcggaatattttctagttccaagatatccttgataaacggacgcgccaaatggaccttcacttctgttatattccccccaaccaccagcgtgtttatggtatgacatttgttgtgcttgaacgccaccaacatgcattccgtcacatcctacaccaagtctatccttcccataaccatcttgtccacgttgatttaaaatatgaccgcccgtgccagctcctctaacaaaaagacctctcatatcaggaatgccagggttattccaatcaccaccaaatcttgttccaactgtgtttctataatcaggatattgatctcctgacactgttccaccgtggcacataatccaacctggaggtgctgaatcacccgcaaacatcataatagttccaactggaactctttcggacgcatatctttcagtggcaacaggttgatcgccatttttccacattccgccgcgcgaccaaattccgtttgctgtaagatggtctaaatttaaagaaccattaatagtttgtccaccgcgagtattaattacatctgcgttccatgctaatgctccagagctatcaccttcaggggcaataccggcttgcgtcgttaatttaactactccacgcatagaaccagtagctcctcgaccatttagtgtttcgcccgttactgcaacatctcccaaattactgttaatttccgattgtgttcctaaacgtataacacccttatattcttgtgttgcaacagaattcataaatgtatacggagaaattgcatatccttcgcggagagttccttgacgtgtttgcgcaacagtagataattgaactacacctctcacagattctgatgcagtatcttcggaaggagctatttgtgaaattaattttattgcaagtttttgtgttttcagtggagtcattgccgtagtatcatcaactccagctaaagctgcaggtgtagatgatattttaataaccccgtttgatgactcagacgaatatctattttggaacacatcgtcagtatggtatttcagtttttgcggcgttattgatgaattattatctgagccttctaatgtttcttcatttgttgaatagcgcgttaaaccatacttagtttcagtagcatttggatacaataatcttgttgctaatgtagctggtgtaacgattttagaattattagttccatctaaaacctcttgctctgacgcaatcattgctattcctttaacttccatagttgcatcaggaataccatttacgccgatattacttatttttgataatgcagactgcactgtcgtgacagtgtcaggaaaattcgatccagtaggatcgaatttaacatattttgattcatttgatacgtgctgatatgtattgttactcatgctattctctcaaaataataaaataccgtaggttgtgtgtgactatctagcgtaacagtttgcgcacctaataattgccaagttccgtatccgggtttagaaggagaaattatttcttgtttgaaagtaattcctttatcagagtattgttctaagatatgttcttggttatctaaatacttaacttgtattttatttcctatggtaggatggtcttcaaatgaatcaattgcaataaattttgcaaccatttcctgcagagctgttctaacggcactggtaaattcgattgaagtcattccattagtagctttaactggaataccaaacatgttaacaataactgtgtcacctggtttggctgaagtatcattgacagttccttcaaatgaccagtagtctgtttgttgcactccagtaggagatacgccgcttatattaactaatacagctccaacttgttgctctgccatatttctaacatcattgatagcagattctacatttgggtcataaaacccttttgctatttgtgaaattgttacagcgcctactggctgattattcataaccgaaatatcatttttcttagttctaaaaccaagaaaatctgctaagcgggaaataactcccgctttattattaagtaaactcattatgcaatccttatccaacggtatacagtaatagacggttgaatattactaatattagcaggaggagtatgtgaagagtttgttgttgcgtaatcttcacggtattttgtatatataggaccagtttcatctgggtcatattggcaacctccaataataactgatccgttttcgtcttcaattaaaactctttcatcggttttagtcgcaggaagatttgcgttttcaagcgttactgatgttgttccaactgttccaccggcagtatgtgaaggatttccgctagaatctaaatcattattgtttaaagcaaagtttggatccgtaacatcatcattccatcctactaaaacttgtcctttaccaaataatttccatgaaccaaatcccatataagtcaccggattatttggatttatagcattttcataaattgaaccaacaggataaatgctgtcgaaaatagatgatattgaattatacattctagtataagaatcaactttttcaacatttggccaaccgattttatcaaaatctgttaaggctacatcaccagtaacttcggtagatgatcctttgctaacataacggtcatccgttaattcaataatgtcatctttttctaaaagagttcctaaatcattattgaaccacgttataacgattatatcacctgattcaaattttctatcaaataaaagactggtaggttttccatcttcatattctatagaataatctgtgtttgattctttccattcaccaccaagagatatacaaccttctcgcgtatctgaactagcgccttcacacaaaaacagaggatatccagcggttccagcctgctgctgtaaaattccattaaaacgaacctcaagagaattaggattaatgggttcaccaggaattaatccaaatgcagaaaatggaattgatttcatcgccgataaatcagtaacataaatgcttccttctaaagaagtctttgatgttagttttgaatctagtacttttatttggcgtcttgtatatgaacttctccattgtgatacaccatccataaatgtttcaatttgaacggtgtcaccaatattacaaggctgtcttaatcgaatattaaatccatcaagaggaactaattcgccttcattttcgcccggagagccaaagtcactattttcgctaaatacatcaccgtaatacaattcgttaccacgatgttttactctgatgttattgacattataactagttccattgaaaacatctaaaaagtctgtttgcccttgaacttcaactaaaaattctttgcgagctacattactaatgtctgaactaataattttatcaatttgcttatttttgacatactcccagcgtcctggagcgcaataaactaactctaaatcactaaattgaacattaatttcaaccgatgatgacgaccctttaattgtatctccggaagcagctactagtgtaactggattgatgttccacgttgcaaatacatccctggctctaattaccttgttgtaatcattgacagttcctttaggaagttgtagagttactcttccagaagaggtattaatagcgtatgattttccccattctgcggttagtgtttgaccagatgaagcatcataagttttccaggcaccggctgaatatggaacatctccatcaccaagttcataataaagttcatcaaagttttcatttatttttataccacctttacgcaggtagtcaccggtaccatcatcaacaacattaccgatattaatattttgtttcattattgagccaccccgattttctgcgtagcgataactttaactgctgctctcataccgacagttgaagaacttatagtcgccgttacataattttctttaatactaaatgcaatattagcgatttcgtcttcttcggtttcattcccaactcgcatgacagcatattcagaagaaatgaccgctgaattaacagtatctacaagaatatttatttctgccgttttaatttttcttccatctactgattggcatgtaactaacaatttagccatgttatattcagtacgatgaaataatggaatgtcaactgacccagatgtagaaatattccatgtaccttcgaccggtgattccttttggccaaacatactttcaatagaataattccaaactgacgtagaattatcagatgaaatacaacgtaaagtaactttactatatgggctagttactaccaaattacctgaaacacctttaattgaatcaatcgcttgaatcgttaaaggattggtaactgatatagatccatttgagttaataaattcaacgcaatcaccaagttcgcctctttcaatgataactttaacacctacagcaga

SEQ ID NO: 6 - DNA, 169930 bp, unidentified
  source 1..169930: mol_type = genomic DNA; note = Found in a bacteriophage isolated from wastewater
agttgaaccatttggatttgttccatttactaatttatttaatgctacaacttgtcctttaattccggaattgttattaccaatttcaacttgtaagttttgaacatcattgttcaatctattaacgctattaacggaagtttcaatagttgaaaccctatttaaaagagacccaggaggagaaggctgacctccactagaatcagttccaacgatttggtttagccatgaaacatttgctcgtagtccagatgaagtgttttcaccaacaattccatttaaaaactcaatagatgttgtattatctttaattcgacctttaatactagaaggaatatcatctgagccaattgatgtttcaatgacagtcaatcgctgtttaatacctccgcttttatttagttcatcatttaaagctgaaatttcttgggtattagtgttaacatctgtgattattgaagtatttcctggatatccaatagaagttttgatagatttaatttcggaactaagattaatttgagattgatctaaattatgcacacgtgaatatatgctttcactaaatgaagatggtctttgtccaagttcttgtctaagatttccgacttcaattgtcagtgaacctacatcagattcaataaatttttcttccaaatcacttagacgtattccttgggaagttatagcatctgtattattaatgatacggtgcttcatacccgtgctgctatttcctacaacaggaagaccgttaatgtcttgcccagcatattgtcctaattcccttttaatccataacaaatcatttctaatcgttctataaactgaatttgcttgcgaattaaatggaccaatgtcagcaagaatgctatcgacagtattattagttccatttaatatttcggtatgttcactcgtaagcgttttaagatcagtgatatcctttttattgatacttatttgcgataaagcttctatatcaccagatacatctaagataccatgaatggttttaatatcttcctgggatgtttctaatgctgttttaagaattcctatattttcgtcaagaacctcaacatttttaaacacggaaacagttggtctattcattgatccatcgtttccatacttagtactagctcctaatatttcttcaccatttttaatccatgaaatacgctcctgaccttcgccaggaacgctatcaacaaaaggtaactcttttaattcaatcatttgtaatccttagtaatgaattttaataatatagtttaatgatatattccatggtctagtttcataaccaattaatccttcacgattaagtgtaccaagggcatctctcggtccacccaattcaaatccatcattagtgaagtatgaagcattatcccagtcggaatattttctagttccaagatatccttgataaacggacgcgccaaatggaccttcacttctgttatattccccccaaccaccagcgtgtttatggtatgacatttgttgtgcttgaacgccaccaacatgcattccgtcacatcctacaccaagtctatccttcccataaccatcttgtccacgttgatttaaaatatgaccgcccgtgccagctcctctaacaaaaagacctctcatatcaggaatgccagggttattccaatcaccaccaaatcttgttccaactgtgtttctataatcaggatattgatctcctgacactgttccaccgtggcacataatccaacctggaggtgctgaatcacccgcaaacatcataatagttccaactggaactctttcggacgcatatctttcagtggcaacaggttgatcgccatttttccacattccgccgcgcgaccaaattccgtttgctgtaagatggtctaaatttaaagaaccattaatagtttgtccaccgcgagtattaattacatctgcgttccatgctaatgctccagagctatcaccttcaggggcaataccggcttgcgtcgttaatttaactactccacgcatagaaccagtagctcctcgaccatttagtgtttcgcccgttactgcaacatctcccaaattactgttaatttccgattgtgttcctaaacgtataacacccttatattcttgtgttgcaacagaattcataaatgtatacggagaaattgcatatccttcgcggagagttccttgacgtgtttgcgcaacagtagataattgaactacacctctcacagattctgatgcagtatcttcggaaggagctatttgtgaaattaattttattgcaagtttttgtgttttcagtggagtcattgccgtagtatcatcaactccagctaaagctgcaggtgtagatgatattttaataaccccgtttgatgactcagacgaatatctattttggaacacatcgtcagtatggtatttcagtttttgcggcgttattgatgaattattatctgagccttctaatgtttcttcatttgttgaatagcgcgttaaaccatacttagtttcagtagcatttggatacaataatcttgttgctaatgtagctggtgtaacgattttagaattattagttccatctaaaacctcttgctctgacgcaatcattgctattcctttaacttccatagttgcatcaggaataccatttacgccgatattacttatttttgatagtgcagactgcactgtcgtgacagtgtcaggaaaattcgatccagtaggatcgaatttaacatattttgattcatttgatacgtgctgatatgtattgttactcatgctattctctcaaaataataaaataccgtaggttgtgtgtgactatctagcgtaacagtttgcgcacctaataattgccaagttccgtatccgggtttagaagtagaaattatttcttgtttgaaagtaattcctttatcagagtattgttctaagatatgttcttggttatctaaatacttaacttgtattttatttcctatggtaggatggtcttcaaatgaatcaattgcaataaattttgcaaccatttcctgtagagctgttctaacggcactggtaaattcgattgaagtcattccattagtagctttaactggaataccaaacatgttaacaataactgtgtcacccggtttggctgaagtatcattgacagttccttcaaatgaccagtagtctgtttgttgcactccagtaggagatacgccgcttatattaactaatacagctccaacctgttgctctgccatatttctaacatcattaatagcagattctacatttgggtcataaaaaccttttgctatttgtgaaattgttacagcacctactggctgattattcataaccgaaatatcatttttcttagttctaaaaccaagaaaatctgctaagcgggaaataactcccgctttattattaagtaaactcattatgcaatccttatccaacggtatacagtaatagacggttgaatattactaatattagcaggaggagtatgtgaagagtttgttgttgcgtagtcttcacgatattttgtatatataggaccagtttcatctgggtcatattggcaacctccaataataaccgatccattttcgtcttcaattaaaactttttcatcagttttagttgcaggaagatttgcgttttcaagcgttactgatgttgttccaactgttccaccggcagtatgtgaaggatttccgctagaatctaaatcattattgtttaaagcaaagtttggatccgtaacatcatcattccatcctactaaaacttgtcctttaccaaataatttccatgaaccaaatcccatataagtcaccggattatttggatttatagcattttcataaattgaacctacaggataaatgctatcgaaaatagatgatattgaattatacgttctagtataagaatcaactttttcaacatttggccaaccgattttatcaaaatctgttaaggctacatcaccagtaacttcggtagatgatcctttgctaacataacggtcatcagtcaattcaatgatgtcatctttttctaaaagagttcctaaatcattattgaaccacgttataacgattatatcgcctgattcaaattttctatcaaataaaagactggtaggttttccatcttcatattctatagaataatctgtgtttgattctttccattcaccaccaagagatatacatccttcttgcgtatctgaactagcgccttcacacaaaaacagaggatatccagctgttccagcttgttgttgtaaaattccattaaaacgaacttcaagagaattaggattaataggttctcctggaattaatccaaatgcggaaaatggaattgatttcatcgtcgataaatcagtaacgtaaatacttccttctaaagaagtctttgatgttagttttgaatccagtacttttatttggcgtcttgtatatgaacttctccattgtgatacaccatccataaatgtttcaatttgaacagtgtcaccaatattacaaggctgtcttaatcgaatattaaatccatcaagaggaactaattcgccttcattttctccaggagaaccaaagtcgctattttcgctaaaaacatcgccgtaatacaattcattaccgcggtgttttactctgatgttattaacattataactagttccacggaaaatatctaaaaagtctgtttgtccttgaacttcgactaaaaattctttacgagctacattgctaatgtctgaactaataattttgtcaatttgtttatttttgacatattcccaacggcccggagcgcaataaactagctctaaatcactaaattgaacgttaatttcaaccgatgacgatgatcctttgatagtatcaccagaagcggctactaaagtaactggattaacattccatgttgcaaatacatccctagctctaattactttattataatcattaacagttcctttaggaagttgcagtgttactcttccagacgaagtattaatagcgtatgattttccccattcagcttttaatgtttgcccagatgaagcattataagttttccaagcaccggctgaatatggaacattaccatcaccgagttcataataaagctcatcaaagttttcatttatttttataccacctttacgcaggtagtcaccggtaccatcatctacaacattaccgatattaatattttgtttcattattgagccaccccgattttctgcgtagcgataactttaactgctgctctcataccgacagttgaagaacttatagtcgccgttacataattttctttaacactaaatgcaatattagcgatttcgtcttcttcggtttcattcccaactcgcatgacagcatattcagaagaaatgacctctgaattaacagtatccacaagaatatttatttctgctgttttaatttttcttccatctatcgattggcatgtaactagcaatttagccatattgtattcagtgcgatgaaatagtggaatgtcaactgatccagatgtagaaatattccatgtaccttcagctggtgattccttttgcccaaacatactttcaatagaataattccaaaccgacgtagaattatcagatgaaatacaacgtaaagtaactttactatatggactagttactactaaattacctgaaacgcctttaattgaatcaatagcttgaatcgttaaaggattagtaactgatattgatccattcgagttaataaattcaacgcagtcgccaagttcgcctctttcaatgataactttaacacctacggtagaagtatcaatatcatgtctagtgccaacttttactggagttgcgtactccgcgatagagtgtttttgataatatccagtagcatggataatttgaccatcagctccagtgccatttgctactgccattttacgttgatcgccaaacgcgttataaattgcgttaaaatcactattaattttattaccaccgtcgaataagatatcaccagtagaagcgttaccaatttcgccggtatcaatcaatttctttggttcttgaatgaacatagcggtttccttatgagtttatagtatttataaagaaaaagggagcccatgggctcccttaatttaaaatgtaaacagaatattgatttcttctgtctgatccattgccataataataggtggcctattttccatataaatcatttcacccgaatgcctcattaaatcttcaggatcataataatccttttcagctttaacgtttggatcatttggatgaactttagcttcaagaggatttgtaattatcgatatttgtctaaatcctttatttcccggcaatgcagcttcaggaaaataaactgaatctaaatatgctttaaaacgaattgtattagctttaacacgataaattaacccaaaatcatcttgctgccaagtgagattatcttcatacccccatctagtcgggtcttcttttaattcctcaggccaaggaactacaatatactcattcgtgcatctatttatagatacatcaggcggaatctcaaaaagatattcccatacatatccatcgccgggttcaattgttccttcagcatctcctcggccttcaggcggagtcattgacctagcagaaggagtccattttccacctaatttgaggcattcatccttatcagttaaagatgcgattgaacacattccagtatcaggaacatctaaacaacgatatactaaccagcctgcgcctgattcagtagcattgtaaggagctgagttacacactacaatatcattaattctaaatgtgtatggatccggatatctagtatctccccaatctcgacgaggaataactgcatcaagcattgatggaagaacttttactgttcccatcatatgcgtccacatgtcagttacacctaatacagaatcggtaggataaggtggggcaaagcccacctcattttcatttgatgaccacggttctgatcttccaaatgtgataaagatagtgtttttatccggaccacttccaattgaattataaaaattcaacattttttctgttctaaattttgaagtaactatcgcacgatagataacacttgaatcattcatctattttaacctgtgttggattttcagggtctcttggatttcctatattatcttttagacgtttattaactaaattcctaaattgtgcaaatgttgttccagatgcatcaaatagaggactcattaatttacgtcgttcagatggcaattgaccttgaaatattgaattattattttcagcattatagtcatcaggaagaggatattctacaccagccattgggccaggttcataaattgcttcgcctgttactgaatcatgctcaatttcaccggttggagtcaatttggctactctatcagcatattcagtaggcaatccagaatcccatttatagtttttgtatttattaattatagtctctgtatgtttaagagttaaaccaacattaataaacattgttaaaagggtaattgctataaatccaaatcctactggatgaacaaaacgaataacgtcagatttccagcgggaagaaggtaaattggatttaattttcattacataatatgatctacttctattaatatagtctatattattttgaagcaaatcctttcctttaaccccacgaataatttcgccttcaaaacctggaagtctttctgctttaacttcttgccctgctattaaacgccccaaaagattatgtatagtcacggtccattgcaatttaccattagaatagcttctttctatataagtaacattacatcttcctgtagctgtataaatcgtttgtcctactaaatcttctgtaagagaatcagattgaatgattacatcatattcagtacctgctcccgattcaatttcaatttcaacttcttcattataaagaactttaaaaagaaatttatatgatgcttcaattcctttagtagaataaaaatcatagctacgtgattcaaaaaatcttgcaacagcatcgcgtttatcagcatttaaataaatgtttcttttatatatctctgaccacaaatattcccacgcgtgctcttctcgcggatattggttacgaattaaatttcgtaaattattatactgagttccatatccatcagaaagatactgaatatatgcttcgcagaatgcctcaaaattagaatcctgtagcaaataagaatcaggcatcattgtgccaatcaatggtcttaaatcagggtcagctaatccacgttcttcttctggtgaccaaggagtttcgcgctcttggttttgtaaaaatgcttttaaaaatacttcagttggcttccaaataatttctactgtatctctcacacgatagttaaaatcataataagaaattatttcgccagaagatttgtagaaaagcatcccagatgcatattttttaaatccggtgaatttaacatttggcattactatagtgcaatcgccatcatcccagtattcatgaactaatctatctggtgatgtttccggaatattttctataactttagtgtattttaaatcagcataaactactacagctttatcagagttgtttatccaacaacgagtgttagattttttagaccaattaaagaacggttctgcgtagtatttcatcggttgaggagtaaaagtttcccaatcagatttttcatctgctataaatgccatcatatgataatgcttatcagctagccattcacgaggaaattcatatttaacagcaccgattaactgatacttcaccacagtttcagggtcattaacaatattatcacttaaaaatttaaaattactcgaagatagagaaactaatttaccatcagttgacatattcgcatatcccggttgaatacgtcttctttcttcttcagtgttgccaaaaactcttttccatgttttcgtgtcatgatttaaaacatatattcctttatcagcagaatcaattatttttgatgttctaggattagcatttaatgtttcaacttctccaataataagagcaaaaactttatcaccaatagaatccattttataacatactgctttaggatttccagttatagtcatagtatcaggttcaaaaagtctttccgaatatgttggagataatgggtcagaatctataggtgcattactcgtttttatgtatctaactttgtctctggcgacaacgtaaatgtaatcatcagtgcaagtaatagcttctgcaatgcggtatacattagctggcaaagtcgcgtaagtggcaaaaatttctacatcaaatcctagatgtaattggtcgccaagtttagcgaatgttatatcctgcgaactaaatctgacatcatcagctgaccatctaacatcagtagatttgcggccgtagaaaatcttgtcgtatcctagaacgtatgttgtgttcgcagattggtaatatactgtcttagataaaggatatcctacacggtcattgaagagctttacagctttccaagtttgtcctttatcattggatactttaactacaggttgataacgctcaaaaaggtataaaatcccttctgattccatcaaataaactcggttaatatccttacatacttgctgaatagaaccttgtatttcatgatactcattttcaccaataataaaattgcttattgatgaaacgtcaacatatgatgggctgaactgaaatgattcattcattaatgcagccattatagtgtcattattaaaattgacataatcagaattattaagagtaaatttttcctgaatgaatttattggctaattgcatttcaatcatgttttgaaatgtataagcatttgtagcaaaagtttcaaactcttcggtataaatccaatcagactgctcaaaatcttgcgcagcagtagctactctgataatgtatgatgtcaacgggtcagcatcatcaaaaaagaagctgttatttgcagtatatcctaagttaatccatctgtattgattactcgggagattttcccccgagtctgtttttgtctcagcgatttctacaaaatagtagaaattagcaccaacgtcatcccagcgtacttgcacctgatttgcggataacttggaaattctgagactagtgactgaaggtgcttttactgtcattgtgatataggctccaaatcgatagttaagtattgtggacgtaaatcattttcaaatacaatcagtgaaccatcgcgcgtgaaaataacatcgtctattggatcagaatatagctcaatagtctgaacctcaaatttatcggatgttaaattaattttagcgatattccaataaatcatgtcagctggataatttatttcaccgataacatagtatttgtcacgtccatcggaacttgctaatttattaaaatcattgcctgtatatggctgaatgttttcattttctgtaacatcgccagaagcaaatggaccaataataactttaccgattcctttagaatctcggtctgttgatactatacgaacgtcatataatacgtcttcttctaagccagtatcaggatttacaacctttcgtccggaattaaatgaaaacgtattagattccatagaacgatcttttatttgattattgtatttaatacccgcttcaggcgttttatagaagttttgtacttcacgtaccatctgaattgtcgccgatgagccaataatagaatgatctgcatcatctacatatgtcaacatcttagatttagcgaaagatgaattaaaaatttctacgtcttcggtataataacgatcaattttatcaattatttgaccttctagccactgttctgattcttgcagcttatttaaagcatatgtgacttttaaattagtcttaacaaaaagataattaggagaaataattgatggtgtaataggagctaaattataatctttgagataatttttaatatcttcgcgttgtacagtagttaaatatagtcctgatttaggtttagcagcaataaatgcataaccaggtttagtagaatcagtgaaagtctgaaccgcttgaataatagaaccgaatctttctgagacgaatgtatcatagtcggttgcagttacgcagcgttgctgggtttcgcgtttaatagtacccaattcgcgaatacgctcaatatcttctggatcgccgccgccatctgccccaacaaaatctgggtcatcatttggattttcgttaatattgatgacagttatatttgttaatgtatctgcgtatgaaaatccgactgcaccattcgcatctgcaccgttagtactgatgtactcaataacaatcgtagagttctgggtaggtttaagacctccaatataattagcggtcaatgctccttctgccgcgttaacagaaatctcaccttcaccaaaataaaattcagtatttccatcaatagtttcacgcatatagtaaatcgttgatgttgaaccagcatgaaccattgactttctcgtccagttaatccattccgctccatcaacatataatttaacctggtttctatcaatatttttatcataaatgataataggtgttaatttatcataaatgatttcagttcttactatacgtccctgggctaattttaaacgtggaaaatactggttatttttatcacgaatagcaataacatcttcggtagagacaaagttataaggattaacagaagtatcttttgcatatgctaaaaagcgagtaccacgaggaatagtaatgtaatttctattcaatgcgtctgtacaagttagcataatttcagtttgagcagctgattttgaagtaggtaaatatccattatcttgcgccgcttgaactactgaactacgtaagttagcagtacgcataaagctttcatatacggcagcattaccaaactgctgaatgtataatgtattataagctaaaaggtcacacagaacgtttaatcttgagccttcaaaatcataatccaaaaattcattttgaccattaagccattcaatgaggttttgttttatttcagcaaatgtacccccgacgaatatctcgggaatagcatttgctgttcttgttaattgataatttacaggggtatttgccattttgaatcctatttaatgaatactttagatgatgcctgagccacagtatcaccacatgatattggatcagccatttgaacagctttctttccagtgacatataccttagaagttctaggttgtgtcactccgccatgtgtttcatatggctttttaatttctgtatgttctgtaattggatcacctgctacgagaacagcaattcctccagtgaatactttactttgtgtagcattcacaactgttggaggccatgcttcatggccagcagtaacacacttatcataacttaatcctgacattattgcctctcatatacgtagcttctcaatttattagcccaacgactccaatttccaactatagtttttgtgtaatttttaacaagagtttttcttattggagcaggaggatcggttggttcagtagtatcagaagatgacctagaattactgccagaacctccagattcactttgttcttggtagtcatatattaatgttacttcataagtgaatgtcttctggaggttttgaggagctttccatagatataactgagtattagaatcagttggaaggtcttcccatgaagcggcagttttaaattcattatctaaacgatatttcaatgcgtcatttccaaatccaaacacagattcatacgttccatataaacgattttcttctactaaaaccccaggagtttcttcgtaactagttatatttatagatactaacgtttcacctgtttctaattgagcggtaaaggtgacgtcgatagaagaaccttccatggattctcctaaatcagcgctcattggaagtatattagccaattgttgaattctctaatgatgtaaatttataatcacattttttcaacgcttttaaaattgcgttataacttacatccgggaggtcgtgttcaattgctttttctctaaaccatttgtatttctgtggatgtggttttcccaaatcctcccaaagttttttgactttttctatactaatccaaggttcaactgatcttagttttttatttctagcatctaatctcgattttcttatcaaaggatcattccatgattgtttcgttccttctatttttcctggatgattgattaatttgtttctatattcatcggatttccataaagatttaacggtattagaaatacgaatttttaatgttggatcattttcaaaagcagttttcatcgcattactcattttctttcgatattctggcgatgcgcatctttctttgtttattttagatattttctctgaaaattctttagttgacgttgatttagctaatgccttcaattgagctttcctatattcaggattagaccacattctcttcaaatcttcggatgaaaaaccatcaccgccggattttatattggtacatagaatatcagatgatttatatttcgaaatccaatatctttctcttgaattgagaatttcataagtagaaacaaattcaattatttcaaaatctattttataaccaggtttattacgtatctttttaatataatcaccggaacctctatacttatcattttctaaatcaaaatatctagattcatgtttaccaatataaacccgtactaatcctttcggattagtaacggttgttttatatatgtatctaaattgaactgtgttagattttttcataattcacctctggaattatttataaacctatgtctatacggctaccatcaattgtgtattgaccagatgaaatagaactcatagatgccattttttctgtccaatcaccaccaacatcccaatcaactgttccagcaactttccaagaaagatttccatttactgtattagtctggtttccttcaactaaagtggtagcatctcctttaactgtaatgtcagcattaccttcaactacaatagtaacattacctttaactaggatagttccattaccttcaaccgtcttagtttcatcgccacgtacaaatattgtattgcttccatcgatttgatgtaaacgattatccatgttgtaataaatttctgatccaccgacgttagtctttttatcaccggctaccaaaaaattaccatcagcatttgttatatcatacaaattatcaacagtttttcttgttcttcttcctgacggtgatacttcttcataagttccagttggatgaactaatctgtatcgttcttgcccaggggtatcatcaaattcttggatatgtccactttcagtttccatcgtatgcacataaggatactcacctttatatgaagaaactggttctttgaataaaattctcgagtcatttggaataggaggatcagcagggtcagaagatttagctacagtagcagccattgcagataaagacctagctggtgttttcacttcaacaccatatgattccaaatttcccgtaagaataatcatggtaacacgggatgcacgaccctttgtttgttgataccacaatgaatcacgaccagctttatatgccttttcccaatctccggctaacatagcagttaacattgtgttaaatttagctacaccgccaacacccatctgaaatgccatattttctaatgccatttgacgagaacgattaactgctttccaaactgggccaactttagaatgtgatttaatgtcacgttgcatatcagctaaatcacgttcaaataaagttaccgcttcttccattgtaatagaacctggatttccggtaatttcacgaccaacttgttttgataaaactttattaatttgggccatatcacgaactggctgcttcatgataagatgaccaataccaattgtcggatatccttcagtatcccaataaacttttagtcttaatccttcatcacggcgaagcatttcagccattgacatatttggattatcatcagttggaatctctgatagtggtctatcatcgggatttatcgcagtatctaaattactatcttggataatattagaagacgaatcatatcctacttctccgccttggtttaatacgttagtatcatttcctagacgtctaggatactgtccagtcgggtcagaaaatccttcaagtctattaggcttttcgcgaactattccaccatacgtgccaagaacaattccgttagttttccatttgtctaaaaaatgaccataaactctagttccttctaccggaccagtaacggagcctccaattccagacattgctgcagaagttataggttgaataactgacatccatggtaatttatcagttggaatacccattacatcgccttgtgctctttgaggtggatgcagaccaaccacacgaacacgaacacgacctaattttaatgggtccattctatcttcaacaacaccaacaaaccaattaaggttattacttatcatttccataagatttctccattatacgtataaggtcgttcataaatgaattaatgtctgattttgctattatttttatttgacgaagtttttcattttcaagaacagccgcttcatacgtatcgaccgcagcaagtgctccttcatattgaggatattttctagctttatcgcctttatcataccaaacatatggattatcatcgtatgatattaaattataaaatttttcaccgttctcattcacatgatatactatttggtctccacccacatttttgtatttttgtatagatgcttgataagcagcttcttgtgaagtaatccatccataatatggatcataattatcattacacatcaataaaacccaatacagctgtggatttccatatatagtatttgctaattcttccggacgtggtgaacctttgatataataagtacgtaagcggtatcccgcaagagcgcgtttaaaatagtctttatagtttctaaaaatatctgtcataggaatagtcggcgcgtttttattcaccgttttggccgcatattcaatcggatcaaaaaatgtaaagagcatgggccctcctgtttataaatatattatctatttataaggagaatccaatggcatattctggaaaatgggttcctaaaaatatatcaaaatatagaggtgaccctaaaaaaattacgtatagatcaaattgggaaaaattcttttttgaatggttagataaaaatccagaaattattgcatggggtagtgaaacagcagtaattccttatttttgtaatgcagaagggaaaaaacgtagatacttcatggatatttggatgaaagattcttctggacaagaattttttattgaaataaagcctaaaaaagaaacacaaccaccagttaaaccagcacatctaacaaccgcagcgaagaaaagatttatgaatgaaatttatacatattcagttaatactgacaaatggaaagcagctcaagctttagctgaaaagcgtggaataaaatttagaattttaacagaagatggattacgagctcttggctttaagggggcataatggctatttttcaaataattaatgaaagcactccccaagttccaaaggttaagcaatcattaaacgaaaagaaatggattcagataggtcttgaatacaaaaaggccaaagcaaaaggaatgacaggaaagcaatttgctgaagaaagaggaatcaaatactctacgtttacttcggcaatgtcaaaatatgcttcaggaattaaaacggctgaaaagattcaaaagcttgaatcaaaaccaatgaataaactcaataagcaagaaagacaactgcttatgataaattcattcaggcaaacattgcgtgataaaattcgtaatgaaggtgcagcaattaataataaaaccagaaagtggtttgctgaaactattaagcaggtaaaaggacataaagttgttcgccctcagccgggacgaatatatgcttttgcttacgatgctaaacacaaagaaactcttccttattgggataaatttcctttgataatttacctcggtttaggtaaacataatttaatgtacggattgaacttgcactatattccacctaaagctcgtcaacagtttctagaagagcttttaaagcaatattcaaatacacctactattactaataaaacgaaattaaaaattgattggagtcaagtgaaaggatttaggggtgcagaccaaatgattaaggcatatatacccggtaatattatgggtagcctagttgaaatcgccccgaaagactgggcgaacgttgtgttaatgccactccaaagcttctactccaaaggaaaacgtttctctgcaaacaaagtttggagcaatgtacgatgaattatgaaaaaatttataattcactaattgatagggctcgcaatagagcccttactggatataaagaaagacatcatattattccgaaatgtttaggcggtagtaatgatgcttctaacttggttgatttaactccagaagagcattatgttgcacatcagctattagtaaaaatacatccaaattctttaaaattatcttatgcagccataaaaatgacggtttcaactaaatatgttaggagaaataataaagtttatggttggttaaaaagaaaacatgcaaataatatttcaaatacacaaactggacgaaaatattataataatggtaaaagatgtataaaattgcatgatggagatataattcctgagggatttattttaggaagaggatggagtccgacacaaggaacaactcattctagaaaaaatgacacatttaaaaacaaaaagcttcaatctgctttagctaataaacggtgggaaaaagaaaagaaaataatgttagataactttggagttaacactattgatgaagcaaagaaaattgttcttgattttaaatcaacttgtcatccaagatattggcgaaagccaactttagaaaaatttccatttatgacttctgctcgtttaagaagtctaataaattaattctattatcttccattcttttctgttgtttgttctaattggaattgaatggaagggacttagacccattataccaccaacatttataaagcattatgaggaatatatgtcgcaagcactacaacaaatttttaaccaagcaaatacaactaactttgtagtatcaataccgcatagtaatactacatctgcttttactttaaatgctcagtcagttcctattccaggaattaggatacctgttactgataccgtgactgggccgtttggactaggacgagcacaacgtccaggtgttacatttgagtacgatccactcatcgtgagatttatagttgatgaagagcttaagtcgtggataggaatgtatgaatggatgctaggaactagcaactatcttacaggcgaaaatactgcccaaaaaacaggtcctgaatacattacgctttacattttagataatagtaaaactgaaatcgtgatgtcaataaacttttataagccttgggtttctgacctgtctgaagtagaatttagctacacggaagattcagacccggctttagtatgtacagcaacgattccttatacgtattttcaagtagaaaaagatggtaaaattatagcagaagtttaatgcttcagtttcatgtgttataatcttaactaaatttgaggagaaacatatgaaactaatctttttgagtggtgtaaagcgtagtggaaaagatactactgcagattttatcatgaataattattctgcagttaaatatcaacttgctggtcctattaaagatgcattggcttatgcatggggcgtattcgcagcaaacactgactatccttgcttaactcgtaaagagtttgaaggaattgactatgatcgtgagactaatttaaatctgactaaattagaagtaattacgattatggaacaagcattttgctatcttaatagtaaaagcccaattaaaggcgtgtttgtttttgatgacgaaggaaaagaatcagttaattccgtagcatttaacaagattattgacgttataaataatattgaagaccaatggtcagtccgtcgtctgatgcaagccctaggtacggatttgattgttaataacttcgaccgcatgtattgggtaaaattatttgctttagattatcttgataaatttaacccaggttatgattattatatcgttcctgatactcgtcaagatcatgaaatggatgcggctagggcgatgggtgctacagtaattcatgtagttcgtcctggtcaaaaatccaatgatacacatattacagaagctggattgccaattcgtgatggtgatttagtaattacaaacgatggttctcttgaagaacttttttctaaaattaaaaatacactaaaggtactataatgtctgaacaaactattgaacaaaaactgtctgctgaaatcgtaactctgaaatctcgcattcttgatacgcaggaccaagcggctcgtctgatggaagaatccaaaattctgcaaggaactttggctgaaattgctcgtgcagtaggtatcactggcgatactatcaaagttgaagaaatcgttgaagctgtaaagaatcttactgctgaatctgctgatgaagcaaaagatgaagaataatggaatttaaagacttttcaacgggtctttatgtagcagctaagttttcagaattaacacttgatgcgctggaagaacttcagcgctctttgcgtgttcctaatccagttcctagagaaaaaattcattcgaccatatgttattcaagagtaaatgtttcgtatgttccatcaagtggaagttttgaagtagcttcttctggacatttagaagtatggaaaacacaagatggatcgactcttgtacttgtgctagattctgaatatctgcgctgtcgacacatgtatgcgcgggcactaggtgctacacatgattttgatgattacacaccgcatataacattgtcttataatgttgggcccttatcatttagcggtgatgtgcaaattccggtcgtattagatcgtgaatacaaagagcctcttaaactcgattgggcagatgatttaaaataatttcacaaagttatttacacggggttttagttgtgatactattaccctatcaaaacaaatgagtgattggagaataaaatgaaaacatttaaagaatttatcaatgaagctacttttaacgaaaaagtaaaaattagcaaagctgtcaagactttgattgctgacatcaattacctatatgatattgatttaactgactatgtaacagttggtaacaaacgtaactttttcgtgtttgacatctctgaacttgaccagaatcaaattaacaacattgagcgttttgctaatgataagggtcttcgtcatgagtcagcgggttataaaaaatacgcaatttatttaaaatgagtttacttttaaatagggttgtggtactattatctcatcaaaattaattaggaaaataaaaatgaaaacatttaaagaatttatcaatgaagcggctgcaccaaagacattcgttattaatactcagacgagtcttgacgatgagtatgcagaggcaattctgaagtcacttgctaagaacggcgttgaagtaatcgcctcggactttaagaaaggggcttccgagatgtttatttctataactaaaggatctaaagctaaaatcaaatcatcattcggtgttgctcgtaccgatcaaatcgacaatcatgactttaaacaaactggtgttaaacggcagaacacaattgcatcacgcggaataaaatagtttataaaccgtttacttttcgatggggtagtgatattattaccctatcaactactgaggagaataaaatgaaacgttgtgaattaattcgaaatgttgctattgcaatttctgcttccgcttttagtttttcaatgtttgttggatttatatgtggattattgactacagcagaaaatgttttttcacttgtagtagcatttttaattggtttaatcgctattgttatggataaaatttctaaaggtgaataaatgaatattaacgaatattatgtttatgctggggattatgcaaatccttctcattttgaaggtaatttaatacctgatagagtttttaatactccttttgaagcgtggagttgggttgaaagtaaaaatggattttcttatcgttatgttgaagtaactgattggaaaggaactaaatatcctaaagagcattattatgtagacccatctaaagtaaattttcttttgttcgcaggcgataattactatccttgtggtggatatgatgatttaattgcgtatgctgaaacagaagatgaattacgtcaaattattgaagacaataaatcaaaacgatttggcgatagtttcgactggtggcaaatcgtaaatgcccatacacatactattgttgataaaggttaataatgattctttatgcgaaagtatcatccattgaaaatggatataaatatgatcaagaagcagctaaagccttgattgatgattatggcattttaacatgttttgaagttgaaaaggtttacattgaccgttcatcttctcaagttaaattagtaaaggaagaccgtaaatttaatacagtaaattttgatttctttattgaaacagaaaaaggccctcttgaatatgatattttcaagaatcctttgggtcttgaatgcatcgtaagtatgtatcatcataaatggtaaatatgctttaagaattatttgttattattaactcatatcacactgattaataccctctatcatcaagggttcttgtttgagagcctttgttaataattgggaatcatattatggatactaaattagctgaaatttttgaaggaaaacatccaaattttagtacaggaaagctgaaagacaaaataataaaagaaaatatttttccatatgagtgtgcaatttgtaaaatttcaaaatggcaaaataagcatattgttctgcaattagaccatattgatggaaataacaaaaatcatcttaaatcaaatttaagattattatgtccaaactgtcattcgcaaactgatacttttgctggtaaaaatattaaaaataataaaaagcgttataatgttagtgatgaagaaattttaaacgcattattaaattcggctactatatcatctgcaattacttcattaggtttaagtaaaggcggaaactataaaagattcattaaaattgctaatgataacaaattatatcatttactggtaaatattaatgaaaagattttaactgatgaaatttacgaagaattagttaaaatcgattattctaaatttggatgggttagtaaagctgctaaaataataggtataagcccacaaaaagctagaaaatggatagaacgaaagtgtccagaattgatagaacagtctttttcacgtaataaataatataacgcgagaatggtcaaattggtaaaggcacagcacttaaaatgctgcggaatgatttccttgtgggttcgagtcccacttctcgcaccaaatttgcggatatcgtataatggcattacctcagacttccaatctgatgatgtgagttcgattctcattatccgctccaatttaatttactccgtgtagctcagtttggtagagcgtctgctttgggagcagaatgtcgcaggttcaaatcctgccgcggagactggaggcgtggcagagtggtttaatgcaccggtcttgaaaaccggcagtcgctccggcgactcataggttcaaatcctatcgcctccgtaattttgctgatttagctcagtaggtagagcacctcacttgtaatgaggatgtcggcggttcgattccgtcaatcagcaccaaggccctgtagctggaaggttcaagcaagcgactcataatcgccagatggtggttcaattccacccagggccatattttgggaacataaatactcttagaaataggagatatttatgttccattacacttataaaataacaaataaaattaataataaaatttatattggtgtgcattctaccgaaaatttagatgatggatatatgggttctggtaaattattaaaaagagcccaagataaatatggtatagaaaatttttctaaagaaatattagagtattttgatgataaagaatctatgcttgaagccgagaaaaatattgtcacagaagagtttttaaatagaccagatgtgtataatttaaaacttggcggtgaaggtggatgggaccatataaatattcctgggatgctaaaccagaagaaagacgctagtttaaaaggagctaaatcgtttaagtcacgttttaaaaatgatattttacttcaagaaaaatatcgtaaacatggttcaaatgtatttaaacgcttgtggtcaactcctgaatacagggaaaaatttttaaataatagcagatttttaaataagcatcatactcctgaaactattaataaaatgaaagaatctcacgccagaaataaacaccaacagggcgaaaagaattcccaatttggtatgatgtggattcattcattagatgaaaaagtttctaaacgtattaagaaaactgacccaattccagaaggatggtttaaaggtcgaaaaatgaaattttaattacggggcatagctcaattgtatagagcaacggacttctaatccgtaggttgaaggttagaatccttctgtctcgaccagacaagaaaccgggtcgctaccggtaagtcgtcggactgatgttccctgggtaaggaattgtgttaataaatctttatgatttgttgatgccctcttacatcacagcagaaacggcgcaccgaattatcgattcgaggaaatatctttgccgtaagccgagtagcgtttttgacggaacgttcggatatggtcgagatatggccttttaaaaatattaagtagcgtcaactgcttaataaccgggttcgaatcccggcgtttcgtacaaacacttgccttagcaggtggaaccccgacaaggttgccgcaaggcttagccccgaccgaaaggttggggctttttagtttgaatcacatagagaatgctgttacggataataacaaagtaataaataattaataaccaaccgataaattatttcaaggattttaaatgaaaacctatgccgaatttttaaccgaagcagcaaaattaccatctgaagcagatcttactaaagtattcttccaattggacccaaaagaccgtggcgattttcttaagtggaaagctaaagctattgaaatgtataacattgataatagttcttttacgatgagtcaagaaaataaattcaataaagcatttttcaaaatttctaagaaactggcatctggcgctcaggttcctaaatctgccttagctactcctgaacgcgcacctgttaaaatttctaagaatatgttcgacactaaaaaatacgttaatgctttgaataaagctcttgatgcattggatgatgcaaagaaggcagcccgcgatcttcaagacgtgtacatcgattttgatcgtaaaactaaaggttctatttcaaatagcgaacgcaatagtgtaagcgtttattctgatagccttgacgttcttggcgatgcgtatactgaaattaaaaatcgtattaacaccgcatctaaactaaaagctgccgcagaagctataatagctaaactagataaataattttaaatccctatctaaatgatagggctttttggtatctaggcctttccgggcctctctaggcatcatttagtttataccctttataatatattatcctaccttttaatttcctctccctgccctagaattccccaaaactttttaaaaattttttcacaaaacggtttacatccttgtccttccatggtactatatcaatatcaactactgatatagaaaacaacttggagaatgaaatggataattacggcgaactgttcaacttctttatgaaatgtgtttcagaagattttggtcgtacagtgaatgatattaaagttatcggtcctgatcatccgatgtttgaaacctatgcagtaatgggtaatgaagacggtcagtggtatactgtaaaggttgtgattaacatgttcacagcagaaggttatgttaaactgtcttctaaagtttaccatgataacgacgaaatcgcagaagaatatttcaataatatgaaataagtgtgtacaaacaccaaggacggtgttattatagatttatcaaaacaaatacagaaacggagaaataaatgactactttaactatttggtttgacgaaaatgaagaaacatactgtgtgaacattgatgaaagtccaatgcctgactttgaatcttcagataagaagtcggttatatcttgggctgaaggttataaagcagcaaaaggcgatgttaaaatagtttataaactctttgaaatataatattctcacggattttaaatcttaatcaacctaaggaaatactatgaacacactgaagaaaattgttgagtttattcgcactaaacttggttctgctatggctaagaatctatctgttgaagaacagtatactgctgcagcagcaaaactgcttgataaaattaaagacctaaaaactgcttctgttaaatctattaatgaagaaaaacgtattcgtgaacttgttatcgaaaagaatcgacaagccgaatcaaaagagcgtgaaattcgtaaacttctttccgaaggtcaagatgtaacaatgcacgctaaactcggtttactatatcgtcgaacagctgagcagctgactactaaagctgatggttatgctgaaatgcgaattgaaatcgccaagaaagtagttgagttagatgatgctcgccaagaacttgcagttaaattggaatatatccgtgaaactcgcgccgcgaatgccctcggaattagtactgctgatgatgtagttgaaattgcagcgctgactaaggttgatattgaagatactcttgcccgagttgaaacctttaatggcaatatttctggggttgaaactacctctgccgatgttcaggaatatattaattctctgaaataatgataaggggcttcggcccctattacttggagtaaataggaatgaaaaatgcaaagtgatttcaattcaatgtttgaagaattccaaagacaagttgatgttccagaccaattattaaatgctcttaaacgtatggcagaaggacgtaattattattggggttcttcatatgaaactgatgaaaatctttctggaagattttctagaggtaaaaagtctttaatacgtcctggaatacttattaacagtattgaatcaattcattcattaacatgcgattttgacgttgaatttactgattttgtttctcctgaatggacggtctgttatttaaacgacgattatgattatcttggcgtttacagtttaagtgacgcatggtttaaacgtaatttacaaaagtcaaatttgttctatattgatactacggtaaaatttcagggaaagaaatatttctttactcttatagttgattctgaaacgaagcatgaaaataaacgtattcttagtaaaaagaatatcttaactattgttgatgatctttttgataaatttgtggaaaatcccaattttgaaagcgatttattactagaaaaatttgttaaggaatgtagagaatatgtcaaagccatcactataccttccaagtaaaccgttgaagtatgaattaaagcgtcagataatttctactgatgtgttaataggtcctgtggtagctgtatcatttgtgattctgctgattgctggaatggttatagacgttatgactgatattgaatctggcgtaatatttttgttagtattaattcttccattagtagttccatttttattggtacctgtaaattgggtaggatattggtatcaaggaaggcattatcgtaaacgtgtacgtgaatggaaagctcagtgtaaaaagattaaaaaggaacaccagcttaaactaaatatgtatgaatttaatgaaattatgaaatttgttaaggaatcacgatgcaaaagccaaaactaaataaagtcaaatattctttttctgagtcatttttaatttttgctgtggcgttggctgcagctcttgctggtagtcttattggattaatgattgactgtattattttaaacatccgcagtaacgtcagcggtatagtagatataatagaagtttggagtgaacttcattatactatagcaatttcattattttcattctttagtatcattttatattttcattatgataattttaaaataaattggcaaagaaaaaaggattacaaaatacaattaaaagaatataataactacatgtcttatattgaaaatgaatcaatgaaagaattcgtgaatgattgtaggaaaatcaaatgattttaaaaactcgctggtatgatttagatgatggggatgatggcatttcagttgatagagttgactggaatggctgttccgaagatatgaaaaatttgctgattagggagtttagaatgggatatcaaccagttaagccatctactgcaacagatgataaattcgtgtgtattcataatggtcgcgctaagttaacgaacgctgattggtttacaaataagattatgattctgtggtatatcattagtcttcctgtgtcattattcgtattttactttttcataaaaaatccaatggacagaatagaagattggattcttttaaccatacttgttaatatttttacagcagcaatattatctgggatatggtacacgttcattgaaatgccatggcggctacgcagacaacaaaagatttttgatgaaaagaaatatactcaaaatttaaataactttatcaccgaatgcaggaaattaaaatgaaaacattatcagctggtattatctttatgacagaagataaagatttattcatgggacgggttactggttctcgtaagcctggaatgatggcacatcgctgggatattccaaagggccgtgtagaaaattctgatttgagcgcactagatgcagcacgaagagaatgtttagaagagactggttttagcaattataatccagaccttctagaagacctaggtgtatttaaatattctagtaataaagaccttcagttattttattatacgattccagtagagcatgagatgtttagaaattgccattgtgggtcttattttgaaaataaagatggcgttatgattccagagatggatgcttttgctcttattcctcgtacccagtggcaatatgtgatgggtccttcactttatcgaataatgaacagcctcttttaatttataaataccttctataaatacttaggaggtattatgaatatatttgaaatgttgcgtatagatgaaggtcttagactcaaaatctataaagacacagaaggctattacactattggcattggacatttgcttactaaaagtccatcacttagtgttgccaaatctgaattagataaagctattggacgtaattgcaatggtgtaattacaaaagatgaggctgaaaaactctttaatcaggatgttgatgctgctgttcgcggaattctgagaaatgctaaattaaaaccagtttatgattctcttgatgctgttcgccgctgtgcattaattaatatggtttttcaaatgggagaaaccggcgtggcaggatttactaattctttacgtatgctccaacaaaaacgctgggatgaagcagcagtaaatctagcccaatctaaatggtatcgtcagacacctaatcgcgcgaaacgcgtaatctcaacatttaaaacaggaacttggaaagcgtatatatgaaaacatatagtgaatttttatcagaatctattcttaacgaagctactgacacatttgcaactaagctaggtgcagctttggttgaagccgaaagtctattagcacgtatttctgaacttgctagtaagatagatactcgcaaatttgaacgtaccagcgatattgttaagcttgaagccttgttgcgtatgtgcgataaaccagaagaaatcgctaagaacggctcgctaatgaaacaacgtcttgaaaaatatatttcaggcgcttcagaaaaatagtgtttacttcctccaaggactttgatactatacattcatcaactacttggaggaaattatgactcgtatcaatttaacacttgtttctgaactgaccgaccaacatcttatggctgagtatcgtgaattaccacgcgtatttggtgcagtccgtaaacatgttcaaaacggtaaacgcgtaaaggattttaaaatctctccaacatttatcttaggcacaggtcacgtaacattcttttacgacaaactcgaatttttacgtttacgtcaaatcgagctaatcgctgaatgcttgaaacgtggtttcaaaatcaaggacacgactgtccaggatatttccgacatccctgtcgaatttcgtaataattatgtcccgtccgaagcgtccattgcgataagtcaagctcgcttagatgaaaaaattgctcaacgccctacttggtacaaatactatggtaaatcaatttactaaggaaaaatgaaaatgtatcaagaatttatcgctgaagcagatgccaaaggcccccaaatttaaagttaaagctttcgttggtgatgccgaagattttggctcattaaaacgtaatgggtattctttcttaggtggcgatggtaaagaaatcaacacctatgcaaaacgtagtgaaattgcttatgttgtagcaagccctaaagtagatgttgacgatattggatatgattttaacaacttcggaattatttctggcggtaaagcttaaacggtttacgcttaagtattaatatggtataattactctatcaaaacaaacaaggaaacaaaaatgaaaacatatcaagaatttattactgaagcgcgagtgagcgcaggtaaattagaagccgctataaataaaaaggcccattcatttcatgatttgtccgataaagaccgtaagaaacttgtaagcctttatattgacagagagcgtattctcgctcttcctggtgctaatgaaggtaaacaggctaagcctttgaatgctgtcgaaaagaaaattgttaactttgcttctaaattcggtatgtctatggatgaccttcagcaagcggctatcgaagcagctaaagtaattaaaggtaaataacagtttactttctcctagaattgtgatagtattattcataattacttggaggggtaaatacagaaatggacaattcatgcgccacggaatggcccaaatttagagagaacaaaatgaaaacatttttaactggaccttatctatccctgatgaatgcttttacacaccattctgatgctagagtagaagaaatttgtaaaaacgattatatcccaccatttgaagacttactcaaacagtattgcacacttcgactagatggtggacgtcaatccggtaaatcaactgcaataactaattttgccgctaattggttatatgatggtggaacagttatcgttctttctaatacttcagcttacgctaaaatttctgcaaataacattaaaaaggaattttcgcgttattctaatgatgatattcgattccgcttatttactgattctgtccgtagttttattggcaataaaggaagcaagttcagaggtttattgctttcgcggattttgtatataatcgatgagcctgttaaatctcctgatatggataaaatttacgatattcatattgaaactgtgcaccactgttgcaatagtaaatgctgcattggtggtattactcgtccacagtttttcataatcggaatgcaatgatgacagacacgcaacttttcgaatatctttatttttcgccaaaaactattaaaaataaattggtgaatcattttgaaattttggcaaataacaacgtcttgagcgaattttatcctaagcaatacaaattacaaaaaggcgtattcaaaggatgcagagttttgtgtactgctcctaatgcacggctaatgaataaaattccatattttaccatggaatttattgatggaccttttaaaggactaatcacccaaagtttaatggcatatgattctgagccatttttaattaaagaacaatcttggataaatttattttctaattgaggttatatgaaagcatatcaaattcttgaaggcacacataaaggtactatttattttgaagatggtattcaagcacgaattattgtttctaaaacctttaaagagaactcttttgtagacccagaaattttctacggtttgcatgcccgtgaaattgaaattgaaccacagcctacagttaaaattgaaggtggtcaacacctgaacgttaacgttctgcgtcgtgaaactctggaagatgcagttaagcatccggaaaaatatccgcagctgaccatccgtgtatccggttatgcagttcgctttaactctctgactccggaacagcagcgcgacgttatcgctcgtacctttactgagagcttgtaatggcaaagataattattgaaggttctaaagatgtgttaaatgctttcgcagaatggtttagtaattcaggcgaacagcaatttaatgaagcgtggaatatgggtgatattagtggaatttatcctacgacagaaatttctgttcagggatatggcattcatgaacctattcgtttagttgaatatgatttgggaacgggcgaggaagtcaaatatgattgaagatattaagggttataagccacatactgaagagaaaatcggtaaagtgaatgctattaaagacgctgaagttcgtttaggacttatctttgatgctttatatgatgaattctgggaagcgctagataattgtgaagactgtgaattcgcgaagaattatgctgaaagtctcgatcagttaactattgctaaaacgaaactcaaagaagccagtatgtgggcttgtcgtgcagtgttccaaccagaggaaaaatactaatggctcaattaagcgcagggtttggttatgagtattatactgcccctcgtcgtgtatctgttgctcctaagaaaattcaaagtcttgatgatttccaggaagtagttcgtaacgctttccaggactatgcacgttatcttaaagaagattcacaggactgtctcgaagaagatgaaattgcttactatgagcagcgtcttgaacagcttaaaaacttacatgaggttcgtgcagaagttacaaagtctatgaataaattgattagatttaaagaataactgtttacttttcctcttgactgtggtataatttttctatcagttaagaggagaataacatgactatcaacacagaagtttttatccgtcgaaataagctccgtcgtcactttgagtcggagtttcgtcaaattaacaatgagattcgtgaggcatcaaaagcagcaggagtctcatcgtttcatctaaaatattctcagcatcttcttgatcgtgcaattcaacgggagattgatgagacatatgtttttgaattattccataaaataaaagaccatgttttagaagttaatgaattcctgagtatgcctccgcgtcctgacattgacgaggattttattgatggggttgaatatcgtcctggacgtttagaaatcacagatggaaatctttggcttggatttacagtttgtaagcctaatgagaagttcaaagacccgtcgcttcaatgcaggatggcaattattaacagtcgtcgtttaccaggaaaggcttctaaagcagtaattaaaactcaatgaggtaagcatgagaaaagcactactcgctggtctattggccatttcaatgatggcacatagctccgagcatactttcagtaatgtccaactcgataacatgcgttacgcgtatcaattcggggaacaattttctaaggatggaaaatataaaacacacaaaaatatccacaagagcggattaggtcatataatggctgctattttatggcaagaaagctctggcggagttaatttaaaatctaaaccaaagcatcacgcctacggaatgttccaaaattatttgcctactatgcgagcaagagttaaggaacttggttataatatgaccgatgctgaaataaaaagaatgttgaataaacggtccaattcagcttcctgggcgtacattgaactttcttattggttaaatatacataagggcgatataagaaaagcaatatcctcttataattcgggatggaatgttaaagcaggttctaaatatgcttctgaagtcctagaaaaggctaattaccttaaaaataataaacttttggaaatagtaaatgactaaaattttggttttatgtataggattaatttcattttctgcttctgcgtcagcagatacatcatatactgaaattagagagtatgtaaaccgtactgcagcggattattgcgggaaaaataaagcatgccaagctgaatttgcgcagaaattaatatatgcatataaagacggagaaagagataaatcaagcagatacaaaaacgatacattgttaaaacgatatgctaaaaagtggaataccttagaatgttcagttgcggaggaaaaagataaagccgcttgtcattcaatggttgaccgtttggtagattcttataatcgaggattgagtactagatgattgtaaaatatatcaagggcgatattgtcgccctctttcttgaaggtaatattattgcgcatgggtgtaactgttttcatacaatgggcagtggtgtagctggtcaattagcaagagcctatcccaaaattttagaaatagataaaaccactactgagtacggttctcgtgataaattaggcgatatgtctattgtttttaaacataaacctaatggttttggcatatgttataacttgtatacgcaatacgaaccaggtcctaatcttgattatggtgctttagtaaactgcatgatagaattaaatctacaggcagaaacccttttgtttaaaccagtaatttacattccacgcataggttgtggtattgctggcggcgattgggataaggtttctaaattaatcgacatgtttactcctgatattgatttaatagtggtggattatgaaagtacattacccacatccgtttgatcctaaaaacaaagtggaaattattcgtcaatgggaacgcatttgccgtactaaatgtccaattaatagtccacatgatgtagataaagactacattggaacattcgttgaatatacctttattgataagaaaggtcgtaaacaacatgtagaagaatattgcttaaaggttacatggttatgagccaaactagtattcttaaaaatgcccactgtgaaaagtgtaagtggcctgttgtttttgctttatgtaatgatgaaatggcttgtgatttcgattattggtgctattgttctaataaaggatgcatcaatcataaaggtgaaggattttattcgggattttatccttatcctgatttcgttaaagaaggtaaaccgaaatgaatagttctgagttacaatatgaagtgttacgtgaacttgataatttaattgaactcgctgttaataaaggttttgccattggaattggtcaaaaagatactgatcatttaactgtggaaatatttaagcaaaagcgaattattttaaaacttttggaaattaatatatgagtttaagcaaagaacaaaaagataaattgtttgagcttatccatgaacttctagatgagcatacagaagcaaacaccttttatgatgaatacggcccgttatctcccgaacagcaggaagaatttgctgatcggtttgataagaaagaaaatgaattaatagcttatgtgaatacgctttaagaaggtgatatggcgagtttaatttttacttatgcagcaatgaatgctggaaaatctgcttctcttttgactgctgcgcataattataaagaacgtggaatgagtgtattagttcttaagcctgctattgatactcgcgattctgtctgtgaagtcgtttctcgcattggaattaagcaggaagcgaatattattacagatgatatggatattttcgagttctataaatgggctgaagcacaaaaagatattcattgcgtatttgtagatgaagctcagtttttaaaaactgaacaagtgcatcaattgagccgaattgttgatacatataatgttcctgttatggcttatggattaaggactgatttcgctggaaaattgtttgaaggttctaaagaacttttagcgattgcagataaacttattgaactaaaggcagtttgtcattgtggtaaaaaagcgattatgacagctcgattaatggaagatggaacaccagttaaagaaggtaatcaaatctgtattggtgatgaaatttatgtttctttgtgtagaaaacattggaatgaattaactaaaaagctcggttagtgcaaaagttataaataggtttatctaactaaaggggtatatatgctacaattaactgaaaagcaacttcgcaatcttactgtgcttcaattagatgaaattcgtagggaagttggaaatatcatttcagctttgcgtcgagaagtatcactcaaccaatctacggcagactatactagattgcgaaattttgaaaaataccttgataaagttaaggccgtgcatcggcataaagtaaatacaggacaaaaatgataggaggcctttatggccttaaaagcaacggcactatttgccatgctaggattgtcatttgttttatctccatcaattgaagcgaatgtcgatcctcattttgataaatttatggaatctggtattaggcacgtttatacactttttgaaaataaaagcgtagaatcgtctgaacaattctatagttttatgagaacgacctataaaaatgacccgtgctcttctgattttgaatgtatagaacgaggcgcggagatggcacaatcatacgctagaattatgaacattaaattggagactgaatgaaattcagcgacttttcacaaagtggaaaaccttcaaaggcagatgaatacttaggtttattaatggctgcacaagcttattttcattctgcacattttgaaactaaaagttatgctagacacaaagcatacgattttattttctctgagttgccagatttgattgataaatttggtgagcaatatttggggtattctggtagaaaatacacgccttcaattccagatgccagtaaacttcctaccgacacaattaaaatgattgatcgcatactagaccaatctaacagcatttataaagaaatgcctccagccattcaaagcacgatagatgatattactggaatgttttaccagagtaaatatcttctttccctcgaataacgttagtctccttcgggagacttttttcattttaccggtttactttccatttgagctgtgatactatacaaccatcggataaagaggagaacatcatgaaaattgaagcacttaatcaagaaggaaatatctacgtcatcattaatggtgattttttcgtcgacatggatgaagttactagtgaagaacttgtagaacttcttaagaaacgttataatatgtgtgatgaagttgcaactcacatggcgtgtgcaatattctctctttcatatgtggtggaataatgattagtatcgaacaagcggataaaattaaggaattggtagctttaattcgtaaagcagatgaggaacttagtgactttgcttggttttcatcaggcattgcaaataaaggcattgatgaacttgaagctaaagttgataatgctttagaagcgttagatatgtttcttgatgaaattatcgatcataatacgagagtttaattatgctaacacgcgaacagtttgaaaaaatcattaaattagcgcatgatattgaaatagattcataccaattagcagttgagcattgtgaaggatattcatacgacggtatagaagcagctaaaaaggatttggacaaatctaaagctaaattagttcaatatcttgaaatgattaggtggaataatgaaaactgaaaagcagatgtttttaatgaagctaattgaagaatatgctaatgcagtttctgactatgagtattctgctctggaaagaggtacggctttcgctaaagaagaattgaaaatcatggttgatgctcatacaaagcttcagaattttattgaaaacgtcatttaatggtttacaagttggcaaggttatggtatagtaatcttgtcaactgccaaggagaagagaatgaaagttttgtttgttgtgtatgtgatgattcaatataattacccaatgtttacttataatttggtaaacaacattattgatatgattcagaggagtatacaatgatgagtgaggcgaaacgattagtattagaagttagttcactttttggtgaattggctatagaaaaagtaaataatatgtatcgtttgacacaagaagacgatatgctatattttacgcctaacgaaattgttcgtttaacccaaattgaaaattcttatactgataaaattgtaagcattaatgatgagcataaaattcatttctattctttatgcccaggatttaatattgaaagcgagtcaatatgcttatcaattaataattgggataattttataactaagattaaatatttttattattccaatgaaagaaaacatagtttaaaatggcttaaaaattgcaatgctattattactaacgcttgcaatcagaatgatgaaactattttaaatgtgtcaaaatgctatgaagagggagatgtagtatctattcgtcaaattgacgattttcgatcacatatcattacattaaacaaagacgaagctattgcactaaaaacttatcttgattctgttattccaactatgatttcaaagtgaggaaatatgtttatttcaagtggaagcggtttaattcgtgttgaatttttaaaagctcaagctaaagtatgtcctgttattgaatataaggctgaataatgaaaacagtaatgaaaagttattttggtagtcatctttatggaacttctactccagaatctgatgtagattttaaagaaatctttgttcctcctgctcgtgatattcttatcggaaatgttaaagagcatatgagtaaaaataccaacaacacatcatctaaaaacactaaagatgatattgaccatgaactatacagtcttaagtatttctttaaattagcagcagatggtgaaactgtagcattggatatgcttcacactccacctgaactagtggttaaatctgatttgcctgatgtgtggaagtttattcaagacaaccgttctcgtttttatacgactaacatgaaatcctatttaggatatgtccgtaagcaagcttctaaatacggcgttaagggttctcgtttggctgcattacgtgatgtattgaaagtagttaatcaaatccctgagcaatgggttgattaccaagaagatggttctattaagcagcgtcgtactaaagttgaagatattaagcatcgtcttccagaaaacgaattctgtgaatgggtgttccataatcatgagaaaacaggcccacagacgttttacacagtgttgggtcgtaaatatcagacaacgctttctcttattgagcttaagcagtcactgaacaaattagatgctgaatacggtgaacgtgctcgtaaggctgaagcgaatgagggcattgactggaaagctctgagccatgcttgtcgtggtggacttcaactattggaaatttacaaaactggtgacttggtttatccactccaagatgctccatttattctcgacgtgaagttgggtaaacatccatttaaaacggttcaagagtttttggaagatgtggtcgatcaagtagaagcagcatccattgaagcttctaagaacggtatgcagcaaaaagtagacatgagtttctgggatgacttccttgagagggtttatcttgaaaaccatcgaagttattataaatgatagggagccttcgggctcccttttttttatttcaaaaatttttcacaaagttgtttacaagcataaagctttatggtactatacaactatcaactactgatacagatttggagaataaaatgaaaactgtaactatcaataagggtatctacttcggtaaagaaatctctggaacttttgagctcttaggcgaatggttcccagataatgctccggtagatgcacaaggagatggtaaagtttttgttgaaattgacggtaaacgtcgcggtgtttgggtttacaaatcagacatttcatatgatggtgtaaaagttgaagaagttaaagaatcgtatgaagatatgaaaacccgcattaataaaagatttaatgttatgggaatgatgacgaatggtattattaacggaaacattcgttcattaattatctctggtgcggcaggtattggtaaaacgtattctttagataaagctttgaataaagcaaatgatattggatatattgaatataaaagcattaacggtaaaatctcaggtatcggtctttatgaacagctttggaataatcgtgaagagaattctgtccttttgattgatgatgtggatgttttctctgatatggacattcttaatcttctgaaagctgctctggacactggagagacccgtaaagtctgctggagcactgcatcttcttacttagaagaaaaaggcattgagcgtgagtttgaatttaaaggaacgattgtttttatcacaaacgttgacattgaccgcgaattagaccgtggtactaaacttgctccacatttacaagcattagtgtcccgctcagtttatttagatttgggtgttcacactaatgaagaaattatggtcagggttgaagatgttattctttcaactgacatgatgcaaaaacgcggtctttctgatgaagaaacttataaagcattatcatggatgaaagtcaatgttaatcgtttacgcaatgtttcactgcgtactgcgctttatcttgctgactttattatgaccgacaaaaacggttgggaagaaatcgctgaaacggtattattaaaatgaaaaaatattttactatctataaaactgaaatattaaatttaaagacaggtattaagaaatactattatggtcgacatataactaataacatcaatgattcgtatgttggtagtggaaattatatagaacgtgtaaaagtgtcaaatgaccacatattatcaaaaacggttttagaagtttttgataattatgataaaatggtacaagctgaaatattatatatcatggcaggtaaattgaaatatggaaaaaactgtgttaacctgtcatacgggggtgaaggaggaaaggttgcagatgaaactaggataaaatgcaaaagcattctataaatttatggaaaaatcctaatcatatacagcatatgaagaaaaagatgaaagaggtcacatccacgccggaagctaaattaaacacttcaataaaaacttcgcaacgatataaggacccagtttttgttagaaaagttagtaatattattaaaaagaaactaaacaatcctgcagtaaaagaaaagcatattaatggaattaaagctgcaaagcgttctcatttaactatatggcagtatgaagatgaattattcgagctttggaaagaaactaaatatggatggagaaaatttacaaaggaagctataaaacacggatatccaaatgaaccgtatcgtagtatggtatcaacttttcagaaaagacatttagaagaatcctaagacaaaaaggcagttcagaaatagattatatggactgccatcaaaaagatgactagaattaaactggtaaatggaggtaatgatgttatactcaaaggctcgtgaaatttacgaaactaaaattaaagaagcagtatttcagttcgcaacaacaatgcgatggacaaatgattgggagtattcaaaaaatcataagaagcctttggtgacaagaaaggctcatatgttagtgttaatagaccgtgagcagattaaagcccgagaagccctccagaatcataaaaaggctgcttttgaatggtttatggataacactgctcctgagactaagaaagcagtgagcgcttggttcagtggaaaaaattgtgaaagaagtttcttttagttgtttacaagaccgttcctctgtggtactatacaactatcaactacggaggaacagaaaatgaacgctaaagatattttcaacctggtaaattataacgatggtaaatttaaatctgaagcacaaagcaagttctttaatgacatctcaatcggaggtgaaatcacggttgacggaggacaaatttacaaatctcgttggaattggatcgttattatcgatgagattggtattgtagaaatttacaaaaatacgaataaaaatcgtacattacactggtctcgtgatactaatgaacagtacaaaaaggataaagcatctaaattatctcgtgtaactcaagaagatattgagttcatcaagaaagatattttgatgtatgataacttaattgctgaagagcaagctgttattgataaatttgacgatattaaagcttctcgtgaaattcctgattttatgaaagaatcagtaaatgaacgatacactctcatttcagagcgtattgaaacttataaaaagcaaagagctgaacgccagaatactcttcggaagtttgaagaacggttaaagacggtactcgcataaccgctttataccaaggatggtataatggttctaagcccttttaactgagattattatgaaacagttgataattaaaagattgaatttattgatatgttgtttatgtatagtaattgcatatggttattatgctattaatgattatatgcattataaagattatgatgttactgtagttaatacccttacaggaactcaaggaaaggggtctagtttatcgtttattgccgtatatgaactcaaagacggttatagatttagcgaatatatttcgccggagatgtattcttcaatagaaaaaggtgataatattactgtaagtttacgtcctttcgacgtaaaacagacattgtttgataatattgtttggttctttggaatggtattagttcaatctgtatgcggtgcttatatagtcttttccatcatattctgcgtatttagtaaaattgaaattgagtgaggaaaatatgtcagtagtaattaataatgtcaatgcagtaattaaatctttagttaataaaaaattgaatgaatggactgtacttcgtcgtgaagagccagataaattttttcatagatttaacctaactttggatttgaatgttattgacagagatgttcatgcagaaattttagataagtttaaagttgatattggatttggattagaaaaacatttacagcgaacaaacgggtctggaatgggtttatctaatcgcattatgaaagcccttaataaaattggagcattgtctcgtattaatgcaagtgaaattcttctcaattataataaaggctatgatctttacggtcgactaatgccgaaattatcattcgatcaaatgattgctgatttgtgggaaaatcaacgacgattattagcattaggcgctcgattagctaaaggtctagataaacaaatgatttttaagaccaataatacagaagaccttaaatgctttaaatttagtactcgtggagatgattattacgtcagagctcgctctactgattatgttaatatggggcatcatctctgtttagcttttgaagttttaaaagaagctggaacgttagaatattcatctggtgctaaatgtccgattggttcaagttgtattttaatttatcgcccggatgaatccagtttaactaaattgcctacaaaacctgtaccagttcacagtaatgaaaaacattctgagcaaattgattattttaataagcaaattgaagagctgaatatttctattcaacagtatgacgatgaaattttcagactatctggattgagtagtaaagctaaatctgagcgtgaaaaattaattaaaattgttgatttacttaaatcttaaggaacactatgaaaactcgttctcaaattgaagatatggttcgtaatgccagctatacccgtaatgttatgacatttttgtgccaaaataatttagaccctgataaagttaatcgtgatattcactttaagtatatgaatagcagtgaatggttacgtcattttagtaaagcgggatatattacacaaatgactgctcgtgagcagctcaccgatttctgtaaaactattgattataaaaatcctctatttgttcaaggcgttggtcaaagtaaggtcgatttatcatctggatttttcaatccaaatcattatcgtattgaatggagatttattgctctattccgtagacaattaaagcaaattttgtctactgcgagtcgattaaaaggttctgacattaacttaaagaacctgaaatttgatggttatactcttcagatggaagtaagaccattaaaagaaaataatagaactgcacgaattagctttaaacctaatacaaaaaattctctttcaatttgtgaatgccttaaatcacagttgacagaagcatttaagtatatggatgttgttgccgctgttcagtctaagatttcacagcatttcgaacgatttaaattagacacaacaacgtatgaacttgatatgatcgtttcatttaaatatgaatttttgagaaaagatgaagtcccgcaagagaaaaagcaggaagtgcaagataacttaaatttatctaattactcatcaaacgatcctaaattttggatgtatagttcaggtaataaagatgcatggaaattcaataaagtgaattttcttcctgttgaaaatccgagtcttaaacctgttgaaaaatggcacgcggatgcgattgagaagtctcttaaggcagtagatgatgaactcgttaaagcgaccaatgaagtgttagaagctgaaaagatgctagaaaaagcacaagaaaaagtcaaaaatctcacgaagcaacgttctaaattgaacaatgcactaaatgcactgaactagtttactttgccacaaggatgtggtataatgttcttactttctactgaggagattattatgactcgtaacgaatatatcaaatcattcaatagcgttattgatgataaagctataccgatgtttggccaaaatagcgttctttctattatcaatcaatggctcaatagtgttgatgcaggtattgtttcttctgctaaatttattcatgaaattcgtaaaatttctagccgtgtagataaagataatatcaagaaaacttttaaagagtctcgtcttctttcatatttggttaatcgggatattctaggtaattttgggaaagaaattaaacgaaccaaagatgtagtaggatataattggttcggtgatgttaattcttatcatcttaataataaagaagaccctgagaatatttttactcgtcgttggattagtaatttcagacttttcaaaggacagattctaaaatcagcttctaaattatgttatggcgattatcgtcaaattcatcctttggcttctgatatgattatcataaaagaatatgaacttgataaaaataaagtatctatttttgtgaattatggattttttacaccagaaactaaccaaaagaacattaataaatttttctcaattgctagcactataactcgtcaattagagaccgcattactttgtatggaaacagtagaaaatattcatacatatcctttcaaaaatatgtgtggttgggaaggatataaaattataattagccttcgtgaagtgaaacgtacgtactcaccgactgataaagaaatttaccaacaaaaatgtgatgaaattgtgaatactcctaaagaagaaactacccttgaagaactaatggataatcttgacgattcgcctgaaccgatagaaattcgtccagaagttattgcactagaaaaagcttataaagaagttctagaaatttctaataaagcgcagaaagaatatgagaaggctaaaaggatttgggaagaatctgttaatcgccttgatcgtttggaacaagctttacagttaattaagtaatttaaagccaaggatggctcggagtataaatcattaacaagtgagaagaacatgaaaactcgtaaacattatattgattattttgacagtcttattactaaacatcgtaattatcagatcggacacagagcagtaatcaataatattcttcgtgatttccttcaatatgttggccaggaaaatcatatctgtaaagatactcaaaacgcttattctcattcgttaggcaatttgcttgaatggtttaaacgttctcgtatgttatcttctactatagctcgtgataacattaaaaactttatgaagccgagcttcattaaatctgagacatctataaccgatttggttcaatttactattgttaacgatgttaaaaagacccatttggctgattggttatctaccattcctgaaactaaatttgctgataaatttgcttgtcaattcaatacacaagtgaatatgctttttaagcatgctcgcaaactatttaccgcgggcgatgaccgtacaaatacagttcatgttagggactgggttattgctgatgaagtaacacacaagccaggtggttcatcagtgttaattaatatccaggttccttattattactcacgtaatctcggcatcatgacagatagagaaattaataagcacaacaaaactattcgtttgttgtcttataaactccgcatgatgttaaaaatcatggacgtagtagaaatgtatgacgaaaccgaagataatggttcaatgttatacagttcacgcattctaattaaactgaaggaccctaatacgtataagcctaaagaacccaaagtagaaaaggctgataacctgagcgaagaatgtgaatatctcaaatctcgactagttgaagttgaaaaacagatcaaagagcacactaaagttcttaaagctttaaatgcaaaagcagacggtttacgtaatgctatcgaggtattgaaatgaaactacgtcttctagaggatattgatatgagcactaatcatggtttggttaagtttattgacgatagttcaaagattgaatttgttcagcgagataaaattcatggtaaagaagagtttgttcctcctgcatggaatgaaatcatgaaaatggttgaacggcgtgaaaatgctgctaaatcggcagcaaaacatccatgcccaaaatgtggaactattcaggttcagttagttaattgggatactgatactttaaaactgaaatgtcgtgagtgcttccataaatttgagagaacattatgattaacctagatgaacttaaaaagattaaagcttctatggttccgggactaaatgaattcgcgaagcaaattgctgaagtacagccgatgcctgacaatttggttaaagatattcttgatgctattggcgataaaactttggtaatacattctaaatcgggaatccaaaatggcaaagcgtaaagagtatgttgaagttgccgaaagggcagtccgtgaattagcaatagcttattataatgaacacggtaaatttcctgatagatatagtgtgcttaagtctgctgtaactcgttcatataaaaatatgctatcagaagtaagtgatattatatacaaacataaagaacaaactggtcaaagtcttgattacgacgagacttttaaacaagtactaggaattaaggaataatatgtttaagatatacggttatgatagtaatattcataaatgtgtgtattgcgataatgcaaaacgccttctaatggtaaagaaacaaccgtttgaattcatcaatgttatgccagaaaaaggtgtttttgatgatgagaaaatcgctgagcttctgactaaactaggtcgtgatactcaaatcggcttgacaatgccccaggtatttgctcctgatggaagtcatattggtggatttgaccaactgcgagaatattttaaatgatgcttgaaggaactgactatattcatgattaccgcggaagcgcggtatatgtaggtgatgaagttgcagtttattatgggtatggaactttgatgacagccaaggttattcaaattaaaaataatcgtgctaaactcgaagtttattattctaatggcgaaaagtctatttctaagtggaaatacggcgattgcatggtcaaactggggtaaatatgatttacgatattaatgtagcaagagctccgtcaatggttactattcctgctgaagaactagatcgtcttcagaaaattgaagaacttctttgggaaattgaatgtgacctgccatcaggactagaatcctggattgatgatgaagaacttaataaattgcgaaattaattggtgaaaaatgactattgaaaataaattagatgttgatgcagttctgagcgaaatcattgaagaccatgatgcattttcggaaaactatgatttcgatttttccgactatcttaaacctatcgaaatagaagactgggtgcaagatggtaaatgtcaatatcgtcagtgtgtttactttagtccaaaacataatgtacatgtagcggtaaatgaatctcggtcaggttcttatcattctgactggtattatgcagttccgactgttgaactagtcgagccccatgaacgtgtagtaactcagacagtacgagaatggattacgctataaaaccttggtgggcggctagatgggaaactgtagagccagagccggaagaaccggtttacactgatgaagaaacaatatataatgaaccaacgataaatgacttaattgatatggagatgggacatgattacagtagataagtggtttagaattaatcgtgctgatacagggctgtgtaattactggccggaacttagtgcaggtactgtctttaaagttcgtgaacttgcaaaagaatgtgaagatgatatagagcctgatactggaattattgaaattgaactttctggcggaaaggttattaacatctacgataagccaattacgtattggtgcttgtggaatactgaatcagtagaaaatggcgaaattgaagaaatcgtagaacgagttgatcaagctcttcataaacctaaagccgcttttcaaggtgaacgcatttcatacgcattagctaaattagctgcacaagaaaataacgatggttatgaaggaaatttgatgcaagctgcggcagaatatattgaatggcttgaaactcaaatttctttttctgaccgagcgttttaatacttgaaaataataaatatccttatctattcaaggtaagggttttattatgttattgactggcaaattatataaagaagaaaaacagaaattttatgatgcacaaaacggtaaatgcttaatttgccaacgagaactaaatcctgacgttcaagctaatcaccttgaccatgaccatgaattaaatggaccgaaagctggaaaggtacgtggattgctttgtaatctctgtaatgctgcagaaggtcaaatgaagcataaattcaatcgttctggcttaaagggacaaggtgttgattatcttgaatggctagaaaatttacttacttatttaaaatccgattacacccaaaataatattcaccctaactttattggagataaatcaaaggaattttctcgtttaggaaaagaggaaatgatggctgagatgcttcaaagaggatttgaatataatgaatctgacactaaaacacagttaatagcttcatttaagaagcagcttagaaagagtttaaaatgacaattgaaaaagaaattgaaggattgattcataaaactaataaagaccttttgaacgagaatgctaataaagattctcgtgtttttccaactcaacgggaccttatggctggtattgtgtctaaacacattgccaaaaatatggtcccgtcttttattatgaaagcgcatgaaagcggaattattcatttccatgatattgattattcccctgctcttccatttactaattgctgtttagtagatttaaaaggaatgcttgagaacggatttaagctcggtaatgcacagattgaaactcctaaatcaattggcgttgctactgcaattatggcacaaattactgcacaggttgcttcccatcaatatggtggaacaacttttgcgaatgtagataaagtactttctccttatgttaaacgtacctacgcaaaacatattgaggacgcagaaaaatggcaaatcgctgatgcattgaattatgcccaatctaaaacagaaaaagacgtatacgatgcattccaagcttatgaatatgaagtaaatactctctttagttcaaacggacaaacgccttttgtaacaattacatttggcacgggaactgactggactgaacgaatgattcagaaagcaattctgaaaaatcgtattaaaggtcttggtcgtgatgggataactcctattttccctaagcttgttatgttcgttgaagaaggtgttaatctttataaagacgacccgaactatgatattaagcagcttgctctagagtgtgcaagcaaaagaatgtatcctgacatcatttcggctaagaacaataaagctatcacaggttcatctattcctgtttctccaatgggttgccgtagtttcttgggtgtatggaaagattcgactggtaatgaaattcttgatggacgtaataatcttggcgttgtaacactgaatcttcctcgtattgcattagattcttatattggaacacagttcaatgaacagaaatttgccgaattgttcaatgaacgaatggatttatgttttgaagcattgatgtgtagaattagttccttaaaaggagttaaagctactgttgctcctattctttaccaagaaggtgcattcggggttcgtcttaaacccgatgacgatataattgagttatttaaaaacggtagaagttcagtgtccttaggatacattggtattcacgaattgaatattcttgtcggtcgtgatattggacaagaaattttaactaaaatgaatgctcatcttaagcagtggactgaaagaactggttttgcttttagcttgtattctactcctgctgaaaacctgtgctatcgcttctgtaaacttgataccgaaaaatatggaagtgtaaaagatgttaccgataaaggctggtatactaacagtttccacgtttcagtagaagaaaatattactccgtttgaaaagatttctcgcgaagctccgtatcatttcatcgcgacaggcggtcacatttcttatgttgaacttcctgatatgaaaaataacctaaaaggtcttgaggctgtatgggattatgctgcgcaacatttagattattttggcgttaacatgccagtagataaatgttttacgtgtggaagtacccatgaaatgactcctactgaaaacggatttgtttgttctatttgtggagaaactgatcctaaaaagatgaacaccataagaagaacatgcggatatcttggaactcctagcgttgttccatggaatttaggtaaaatgaaagaaatggtaaaacgagtaaaacatgcataggtattatataatttataaaataacaaatataattaattcaaaggaatatatcggtgcgcatagcaccgataacataaatgacggttatatgggatcaggaacattgattcgtgccgctttattaaaatatggtagaaaaaattttaataaagaaattttacatgtttttgataatgaaaaacaaatgtatgataaagaagctgaacttgtaaccgaagagtattgtctaaaagaaaatacatataatattaaacccggtggaaaaggtggaactgcttatgaacagacacttgaacatcgccacaaaaatagtttagcaaataaaggtaaaaagagaacagaagaaactaaaatagctatttcacgtgctttaaagaaatataaacgtacgccagagcatcaagcaaatttaaataaagccgtaagcatagctatgaagcgaaaagatgttagaagtaaattagctggagagcggtctgagaaagataaattatctatatcaaacggtgttaaaaaatattacaattctttgagtgaagaagaacgcgaacttcatcgcaagcgaattattgaaggtaaaaagaattctcccatgtcattggaatctagacaaaagctttcaaaagctttaaaaggacttcaagttggttcaaaaaatccaatgtatggaaaaatttctccaactagcaaaaccgtttcagttgacggtattaaatatgattcaattaaaaagtgctcaaatgccataaaagtttctagacatcttatactaaaacgctgtaattctactgatgaagcttggaaaaattggatattattatgaattatgacagaatatacccgtgctgctttgttaatggtcctggatgcaggacagttcttttcgttacaggttgtttgcataaatgtgaagggtgttataataaatcaacatggaatgctagaaatggtattccattcactggtgaaacactagaacaattgattgaatgtttgaataatgattatatagaaggattaactataactggaggagaccctctctatcctgataaccgagatgttattcattgcattgttcaaacagtaaaaaatctttatcccaataaaagcatttggttgtggacaggatataagtttgaagatattaaacaactagaaatgcttaaatatgttgatgttattattgatgggaagtatgagaaaaatcttccgaccaaaaagctgtggcgaggatcagataatcagcgactttggtcaaataccgatggggtgtggaaacatgattaaattgaattatattatggatactataaatgatatgatttttcattttggtccagaattttattcgcagtatagtttagtgcttatcaatgcttggttaatcaattaagggtaaaatatgtataaatttcgtaaaggtttagctgattttcttacaactgtaacattctttctgtttatggcagttggagctattttccttattccttttattgctatatttttcgtgattagtttaatttctccagaaaagggcttatcttctagcgagttcaataagcgtctggataaaattactaacaagctgaatgctgctcttagtaaggaatagttgtgaaacaaaataagattgaagtctatggaattccagatgaagcaggtcgttgtcctggatgtcaatcagttacaaaacttctaaaggagcttaatgctccttttactttctataaagttcttacaaataatggtaagattgagtatgatcgcccactgattgtatctcttgctaaacgcgctggattcacatctcttaacattcgttatccagtcattttcattaatgattctagacaaaagaacattaaacacttcaaagaaactctcatttcacttggatatgatagagatatcatagaagactaagacgggccctctgggcctttctttctcacattctgtatattaccattctaagctatcgttcccttcttatcattccctaaaataattttcacaaagttgtttacaacaagctcaaactgtggtattattaacacatgaattgcctttgaggaattgatatggttatgattgataaagaaattaaaaagggacaatattattttattaatggtaatgttgttcgtgttacttacgtaaatggttatgatgtttattatcttatacttaagttacataaacacatgatttgtgatcgtgctgtatttagttcagttgctaaggaaattaaactccatgggtaaaacgtatcgtcgtaaagacttgaaagttcgtgattatgactatttcggaaagcgtaaagctcctgatggggtaagtcataaagatatagttgaaaacatttttcgttcagataaatggcgacgtatgcgaggtgttgattcagaggttaagaatgaattgaatcgtcaactgcgtggtgaagtaagaaagttgaaaaaatcagtttacattgacgatgattttgattataatacatctcaacgagttgctaagcgcaaatcaaacgagtgttatcgttacagctgaggaaaatatgaatatcaaacgaatgctttttaagcaggggttatacactttaaatgttactccaaaaggcgatacaactaagtggtcagtaaatgactggattaaatttattgatgaaaatggtaactggaaaatttaaatgaatcctgaatctaaattatcgcagcgaattgccgaagctcgtcgtcagttctttgaaaatatgatagcccaaggtattgatgacgaagtttttctgaactggttttggaatcacaaatattcaagttgctcaggagcaatattaatatcagccgcaatgatgtacgaaggctggaagggtgccaaacggtttagctaagggcttcggccctttttggataataaaattttaatgcaattgaggataatgtatgactattcaaattaaaaacgccatcaattcttacgcatatgataaagtagtttctttgctagaaaaaggcgatattgtaactcctcaaattttggataaatgggaaaaagagcttcatcaaatgatgaaacagaatgatcagaagattggacgcaatactgtccgtgaattgttggttcaatatatcttgtcagaatttgatgttaaagcttttggtgtagaatctaaagcttatcaaaagcatgaaatttccgataaaactattcgtcgcatgaaaaatcaacgcaagaaaaaatttgcagacctgaaaattactaaggtataattatgaacgaagctcttattaacgatttgcgtcttgccggatatgaagtaaatacaaacggcaatggtttaactcaaattgaaggaaatggattcatccttgagtatgaatttagccaatggtggttatatgccaattacggcgaattgattgaatatgttgaccaatttgattcactagatgcagctcttggagcggctaagttgatgaatgtatgaaatttattaatatttctattactattgaaaattatggcattttctatgttgaccaatacatgaaaatttcatttttcccaaataagactggtgttggatattgggaaagccatgtttctgaattaaatgaaagcgaatatgttagcacacatgaaaagtttttagactttttatatcatgctgatctaactagtcattatatagatattcatgaatttaaaaagatgatggagaaagtattccaagcatactgcttacttagataactgatatcctctatgctttaagatagatcttcaaatattatgatataatagatctatgaattgagctaagaggtgaaaatgtcagaaactaagcctaaatataattacgtaaacaataaagagcttttacaagctattattgattggaaaacagaattagcaaataataaagacccaaataaagtagttcgtcagaatgatactatcggattagccattatgcttattgcagaaggcttatctaaacgtttcaacttttcaggatacacccagtcttggaaacaagaaatgattgcagatggtatagaagcttctattaaggggcttcataattttgatgaaacgaaatataaaaacccacatgcgtatataactcaagcttgttttaatgcattcgtccaacgtattaaaaaagaacgtaaggaagttgcaaagaaatatagttacttcgttcacaatgtctatgacagccgtgacgacgatatggttgcgttagtagatgaaacttttattcaagacatctacgataaaatgacgcattacgaagaatcaacctatagaacaccgggggctgaaaagaaaagtgttgtagacgattctcctagtttggattttttatatgaggctaacgattaacctctccggattcttggaagaaatacctgaagttgaagctattccctatttacttaaaatgtatctcagggaagttttagctcttgacattgatattgatccagaaaatccgtatgataccgcttttaaatctaatggtgtagaattaaactatcggtatcatttaacagatgatgatttttattttatattagagaaataatatgactgataaacccgaaattaatgatgaagtggaaaagcttatttcttctattgaagaaaagaaccgtcttgaagcagaaagaaaagcaaataagttattgtctaaaaacaaacgcgaactgaaccgtctttataagcacgctcagattgcagctgaaaacaataattttgctcaatacgaatatgctatcaagaaaagtcgggatattctaaaacagccatataacgatgaactcatcagtattctttggaagactactagatcgcaaattgaggatatgattgatgcttacacacgtaaaattcaagcgtcttaaaattaatgcaggatttactgaatctttgaatggtcatctttgtgtgaaaatttctgaaaaagaataccatgatagttcaattaaagaagttaatcctcctattgtaagagcagaccctaatatgaaagtgtgggttgattcctatcaagtcaaaaaatggtggcaactatgaaagatgaacacccagacttctgaaatagattataataaaattcgttcctctaaagaggaaatgatgagacgctttaaagagtctcatgataaagctaaagcagaaggaactataaaatataagcgcataaaatttaaaagttctaacgagcctctgtatggcgtattatgcggataggagcttcggctcctatattgctttataaatttttggtaaaataaaccaaaacaaagaggatattaaatgaaagtatgtatttttatggctcgaggtcttgaaggttgtggtgtaacaaaattctcactcgagcaacgtgattggtttattaaaaatggtcatgaagtgactttggtttatgctaaagataaatcatttactcgtaattgcgcgcatgattataaatcattttcaattccggttttattggcaaaagaatatgataaaacacttaagctggtaaatgattgtgatattctaattatcaattcagttcctgctacttcggttgaagaagacactattaataactataaaaaaattattgataacattaaaccttcggttcgtgttgtagtttatcagcatgaccattcttctctttctttgcgtcgaaatttgggattagaagaaactgttcgtcgagctgatgttatttttagccattctgataatggtgattttaataaagttctgatgaaagaatggtatccagaaactgtttctctgtttgatgatattgaagaagcaccgacagtatataactttcagcctcctatggatattgcgaaggttcggtcaacttactggaaagatgtttctgaaattaacatgaatatcaaccgttggattggtcgtacgactacatggaaaggtttttatcagatgtttgattttcatgaaaaacatcttaaacctgcaggactaagtactattatggaaggtctggaacgttctccagcgttcattcctattaaagaaaaaggaattccatacgagtattatcgtcttcatcaagtagaccaaattaaaattgctcctaatttgccaacgcaaattcttgaccgttatgtaaatagcgaaatgcttgaacgcatgagtaaatccggttttggttatcagctgagtaagttggataaaaaatatctgcaacgttctttagaatatactcatctcgagcttggtgcatgtggaacaattccggtattttggaaatctactggcgaaaatttaaaattccgtgttgataatactcctttgacctcacatgatagcggtatcatttggtttgatgaaaatgacatggaatcaacatttgaacgtattaaagaactgtcatctgaccgaactctttatgaccgtgagcgagaaaaagcatatgaatttttgtatcagcaccaagattcaagcttctgctttaaagaacagtttgacattattacaaaataaagggcttcggccctttagctttatacggagtttgatataatgatatttcttggatatgtgatactttttcttgcattttatctattcactagagcatgttggattgggttctttagcacgccagatgggtttatttcaataattttattttgcatttcaatgacggttcttgatatatgaaaattttaaatttaggtgattggcatttaggcgttaaagctgatgatgagtgggttcaatccattcagttggatggaattaaacaagcaatagaatattctaagaaaaatggaattactacctggattcaatatggcgatatttttgatgtgcgaaaagcaatcacgcataaaactatggagttcgctcgtgaaatagttcaaatgcttgatgatgctggtattaccctacatactgttgtaggaaaccatgatatgcactttaaaaatactttaactccaaatgcctctactgagcttttggctaaatatcctaatgttaaagtatatgataagcctactacagtagattttgacggatgtttaattgatttaattccttggatgtgtgaagaaaatactggtgaaattctcgagcacataaaaacttcttctgcttctttttgtgttggtcactgggaactgaatggattttatttttataaaggaatgaaatctcacggtcttgaacctgatttccttaagacttataaagaagtgtggtctggtcacttccatactatttctgaggctgcaaacgtcaaatatattgggacaccatggacactaactgcaggtgacgagaatgaccctcgtgggttctggatgtttgatacagaaacagaacgaatggaatttattccaaacaacactacctggcatcgtagaattcattatccatttaaaggaaaaattgactataaagattttacaaatctatcagtacgtgttatagtaactgaggtagacaaaaatctgacgaagttcgaatctgaactagaaaaagttgtgcattcattacgagttgtgtcaaagattgataactctgtcgagtcagatgacagtgaagaagttgaagttcaatctcttcagacgttaatggaagaatacattaatgcaattccagacatcactgattctgatcgtgaagcacttattcaatatgcaaatcagttatatgtagaggcaacgcaatgacttttgatgaatttaaaaatgttatgatgagtcagcattttgaatgcgaagtaaaagatgatattggtcataaagaaattattgaatattggtttgaaccgttagaggttgaagataattgtattaaaaaggttacagtctgcactgactgggctgtatcttttaacttcaacattttagataatgacacacctaaatcattacaagatatggctgtatcttgtattaaggatgcatactgtgaagttttcgacatttgacattaatgatgaattcatagcaaatattgattataccgaagaagattctagatatgttggaataatttatattacatcaaaaacagcacaaggtgttgtttgcatggctgaatttgatgaatactttttagattatgatgatatgatagaatggtctaaaagatacattaaaaggaatcttttgtgaagaattttaaacttgacattaatgatgaatttttaataaaggaattagttgaaaaattagcgttgagtgaagaagacgccaagtcttacattaattttatttctgtgaattcaactgttaaaactccaggtaaaacggaagcacaccacgtgcttcctaaatcaatatttcctgaatatttaaaatctacatggaatttagttaatttaagtcattttaatcattttaaagcacacttcttattagcaaaaggtaaaaatggaaaaatgctaaatgctttaaatagaatgatgtcaggaaaaacatataaaaatttatctttagccgaagttgatttaatagctgctgaatatagttttataaaacaagatgtaagtgacacaatatcaaaaaggcttcaacagtattattcaaatccgcaaaatagaaatgctgctagagaaagggcattaaaatatttttcagtagcaaaaaataggaaagataataaagaaagattaaataattttaaaacaaaacaaaaaatttcaatggcttcaaggggatggtttaataacgaagaaaataaaattaaacaccaaaaggctgttcgtgctgctttatcaaaacctgaatataaaatagctatatcaaattcagtagctgctagttggaaaaatccggagattagaaaagctcatatagcatctcgacgaaaaggatatcattgggataataaagacaaattgtatgaattgtggatatcatataatcgtcctaaacatgtaatgtttaggaaaatgttagttaagaatggatatccaatagaggcttcattacaggctttagttaaagaattttcttcattgtgaacaattggatacaaaatgaaatcatttaaacttaatagagtaaaatataaaaatataatgtcagttggtcaaaatggagttgacattcaattagataaggttcaaaaaactcttattactggacgaaatggcggtggtaagtctactatgttagaagccatcacatttgggctttttggcaagccatttcgtgatgtaaagaaaggtcaattaataaacagcacaaataagaaagaacttttagttgaactgtggatggaatatgatgagaaaaagtactatatcaaaagaggacaaaaaccaaacgttttcgaaatcaccgttaacggtacacgtcttaatgaatctgccagcagtaaagatttccaagcagaatttgaacagcttatcggaatgtcatatgccagtttcaagcagattgttgtccttggtacagcagggtatacccctttcatgggtttgtcgacccctgcgcgaagaaagcttgtggaagacctgcttgaggtaggaacattagctgaaatggataagcttaataaagcactaatacgtgaattaaattcgcagaaccaagtgcttgatgttaaaaaagatagtattatccaacaaattaaaatatataatgataacgttgaacgccagaaaaaattaacgggtgacaaccttactcgtctacaaaatatgtatgatgatttggcaaaagaagctagaacgctaaaatcggaaatagaagaagctaatgaaagattagttaatattgttttggatgaagacccgactgatgcatttaataaaatcggtcaagaagcagttttaattaaatcaaaaattgactcgtataataaagtcattaatatgtatcacgaaggtggattatgtccaacctgcttgtcacaattaagttccggtgataaagttgtttctaaaattaaagataaagtttctgaatgtacgcattcgtttgaacagctttcaacacaccgtgataatttaaaagttcttgttgatgaataccgagataatattaaaactcagcagtcgttggcaaatgatattcgcaataaaaagcaatctctaatcacgacagtagataaagctaaaaaggttaaagcggctatagaaaaagcatcttctgagtttattgaccatgctgatgaaatagcactgcttcaagaagaacttgataaaattgttaagacaaaaactaatttagtaatggaaaaataccacagaggaattttgactgatatgctcaaagattctggtattaaaggtgctattattaaaaagtacattccattatttaataagcagattaaccattatcttaaaataatggaagcggattatgtgtttacattagatgaagaatttaatgagacaattaaatcccgtggtcgtgaagattttagttatgcttcattcagtcaaggtgaaaaagcgcgaattgatattgctcttttatttacttggcgtgatattgctgaaaaagtttcaggtgttaaaataaacacactaattcttgatgaagtttttgattcagcgaccgacgttgaaggtgtaaaagctatttcaactattttagatagtttaaaaaatactaatgtttttgttatttcgcatagagaccatgacccacaagtatatggtcagcatcttcaaatgaagaaagttggtcgatttactgtaatggtttaatttataagagattatgctttaatttattagagtataatctctatggaggaaaaacatggaatattcaactggacagcatttattaacttttcctgaaataaaacgatatattctgagaaataatttttctaatgaagagcatatagttactgaatctatgcttaggaatgcatttaaagcagaatatacaaaaataatgtccaatagaaatgaagcttggactgttactgattattatgactaaaggtgtattatgactaaaattactgtgaattatactgttgatgtaaaagatattcagccaaaacacgtgcgttctgaatcaaatccacaaaaccaaaataaaattcgtcgagcatgggttttgtctctttctgataacgcaatggaagttattcagaacaaaattaaatctgcacctgctcgtcatgcgtattatgaagctatcgatcgtgaagtaagtaataaatggattgaactaatgcgcaaacatactgcagaatccctaaacgccggtgctaaatttattatgacttcatgtggtgaacgccttgaagatgattattgcggtaatgcagatgaacgtctaattgttgctgctcaaattgttgcggaaacaattgcggctgattttaatcgttaattgctttattaaattagttataaaattaaatctcatttgaattgaaggaaattacatgaaactgtctaaagatactactgctctgcttaaaaatttcgctactattaactccggtattatgcttaaatccggtcaatttattatgactcgcgcggttaatggtacaacttatgcagaagcaaatatttctgacactattgattttgatgtagcgatttacgatttgaacggttttctcggtattctgtctctagttaatgacgatgcagaaatttcccagtcagaagatggaaatattaaaattgctgatgctcgttcaacaattttttggccagcagccgatccgagtacagtagttgctcctaataaaccaattccattcccggtagcatctgttgttactgaaattaaagctgaagaccttcaacagctgttgcgtgtatctcgcggtctgcagattgatacaattgctatcacagtaaaagaaggtaaaattgtaattaacggttttaacaaagtagaagattctgctttgacccgtgttaaatattctttgactcttggtgattatgatggtgaaaatacatttaatttcattatcaatatggcaaatatgaaaatgcaaccaggaaattataaacttcttctatgggcaaaaggtaaacaaggcgctgctaaatttgaaggtgaacatgcgaattatgtagtagctcttgaagctgattctacccacgatttttaatagagggcttcggccctttataatttacactaaaacttgaatgaggaaattatgattactgtaaatgaaaaagaacacattcttgaacagaaatatcgtccatctactatcgatgaatgtattcttcccgcctttgataaagaaacctttaaatctattacaagtaaaggtaaaattccacatattattcttcattctccttctccaggaacaggtaaaacaactgtagcaaaagcattgtgtcatgatgtaaatgctgatatgatgtttgtgaatgggtcagattgtaaaattgatttcgttcgtggtcctttaaccaattttgcgagtgcagcttcatttgatggtcgtcaaaaggtaattgttattgatgaatttgaccgctcaggtttagcagaatctcagcgacatcttcgttcctttatggaagcttacagctcaaactgtagtattattattactgctaacaatattgatggtattattaaaccgcttcagtcacgctgccgagttatcacattcggtcaaccgaccgatgaagataaaattgaaatgatgaagcagatgattcgtcgattgactgaaatctgtaaacatgaaggaattgctatagctgatatgaaagttgtagcagctttggttaaaaagaattttcctgattttcgtaaaactattggcgagctcgatagttattcatctaaaggtgttttggatgctggtattttatcactggttactaacgatcgtggtgctattgatgatgttcttgagtctctcaaaaataaagatgttaaacaactcagagctttagcaccaaaatatgcagctgattattcgtggttcgtaggtaaacttgccgaagaaatctattcacgtgtaactccacagagtattattcgtatgtacgaaattgtcggcgaaaataatcagtatcatggtattgcagctaatactgaattgcatttagcatatcttttcattcaattggcatgcgaaatgcagtggaagtgatatgagcttatttgaagatgatattcaattaaacgagcatcaagttgcttggtattcaaaagattggacagctgtccaatctgctgctgattcttttaaagaaaaagctgaaaatgaattttttgaaataattggagctattaataataaaactaattgctctattgctcaaaaagattattcaaaatacatggttgagaatgcattatcacaatttcctgagtgcatgccagctgtatatgctatgaatttaattggatcaggtttaagcgatgaagcccattttaattatctgatggctgctgttcctcgtggtaaaagatatggtaaatgggcaaaactggttgaagattctaccgaagtattgattattaagttacttgctaagcggtatcaagttaatacaaatgatgcaattaactataaatcaattcttactaaaaatggaaaacttcctttagtattaaaagaactaaaaggtttagtcacggatgattttttgaaagaagtgactaagaacgtaaaagaacagaaacaactcaaaaaactagcattggaatggtaaaatgattgaaattactcttaaaaaacctgaagattttctgaaagtaaaagaaactttgactcgtatgggaattgctaataataaagataaagttctgtatcagtcctgtcatattcttcagaaaaaaggactatactatatcgttcattttaaagaaatgcttcgtatggatggtcgccaagttgaaatgacagaagaagatgaagttcgtcgtgattcgattgcatggctattagaagattggggactgattgaaatcgttcctggtcaaagaacttttatgaaagatttaactaataacttccgagttatttcttttaaacaaaaacatgaatggaaactcgttcctaaatatacgattggtaattaagcaaggggcttcggccccttatttggagtataatatatcaagagcctaataactcgggctataaactaaggaatatctatgaaagaattttatatctctatcgaaacagttggaaataacattgttgaacgttatattgatgaaaacggaaaggaacgtactcgtgaagtagaatatcttccgactatgtttaggcattgtaaggaagagtcaaaatacaaagacatctatggtaaaaactgcgctcctcaaaaatttccatcaatgaaagatgctcgagattggatgaagcgaatggaagacatcggtctcgaagctctcggtatgaacgattttaaactcgcttatatcagtgatacatatggttcagaaattgtttatgaccgaaaatttgttcgtgtagctaactgtgacattgaggttactggtgataaatttcctgacccaatgaaagcagaatatgaaattgatgctatcactcattatgattcaattgacgaccgtttttacgtctttgatttgttgaattcaatgtacggttcagtatcaaaatgggatgcaaagttagctgctaaacttgactgtgaaggtggtgatgaagttcctcaagaaattcttgaccgagtaatttatatgccatttgataatgagcgtgatatgctcatggaatatattaatctctgggaacagaaacgacctgctatttttactggttggaatattgagggatttgacgttccgtatatcatgaatcgcgttaaaatggttctcggcgaacgcagtatgaaacgtttctctccaatcggtcgggtaaaatctaaactaattcaaaatgtgtacggtagcaaagaaatttattctattgatggcgtatctattcttgattatttagatttgtataagaaattcgcatttactaatttgccgtcattctctttggaatcagttgctcagcatgaaaccaaaaaaggtaaattaccatacgacggtcctattaataaacttcgtgagactaatcatcaacgatacattagttataacatcattgacgtagaatcagttcaagcaattgataaaattcgcgggtttatcgatctagttttaagtatgtcttattacgctaaaatgcctttttccggtgtaatgagtcctattaaaacttgggatgctattatttttaactcattgaaaggtgaacataaggttattcctcaacaaggttcgcatgttaaacagagttttccgggtgcatttgtgtttgaacctaaaccaattgctcgtcgatatattatgagttttgacttgacgtctctgtatccgagcattattcgtcaggttaacattagtcctgagactattcgtggacagttcaaagttcatccaattcatgaatatatcgcaggaacagctcctaagccaagtgatgaatattcttgttctcctaatggatggatgtatgataagcatcaagaaggtatcattccaaaggaaatcgctaaagtatttttccaacgtaaagattggaaaaagaaaatgttcgccgaagaaatgaatgccgaagctattaaaaagattattatgaaaggcgcagggtcttgttcaactaaacctgaagttgaacgatatgttaagttcagtgatgatttcttaaatgaactatcgaattatactgaatctgttctcaatagtttgattgaagaatgtgaaaaagcggctacacttgctaatacaaatcagctgaaccgtaaaattcttattaacagtctttatggtgctcttggtaatattcatttccgttactatgatttgcgaaatgctactgctatcacaattttcggccaagttggtattcagtggattgctcgtaaaattaatgaatatctgaataaagtgtgtggaactgatggcgaagatttcatcgcagcaggtgatactgattcggtatatgtttgtgtagataaagttattgaaaaagttggtcttgaccgattcaaagagcagaacgatttagttgaattcatgaatcagttcggtaagaaaaagatggaacctatgattgatgttgcatatcgtgagttatgtgattatatgaataaccgcgagcatctgatgcatatggaccgtgaagctatttcttgccctccgcttggttcaaagggtgttggtggattttggaaagcgaaaaagcgttatgctctgaacgtttatgatatggaagataagcgttttgctgaaccacatctaaaaatcatgggtatggaaactcagcagagttcaacgcctaaagcggttcaagaagctctcgaagaaagtattcgtcgtattcttcaggaaggtgaagagtctgtccaagaatattacaagaacttcgagaaagaatatcgtcaacttgactataaagttattgctgaagtaaaaactgcgaacgatatagcgaaatatgatgataaaggttggccaggatttaaatgcccgttccatattcgtggtgtgctaacttatcgtcgagctgttagcggtttaggtgtagctccaattttggatggaaataaggtaatggttcttccattacgtgaaggaaatccatttggtgacaagtgcattgcttggccatcaggcacagaacttccaaaagaaattcgttctgacgtactgtcttggattgactactcaactttgttccaaaaatcgtttgttaaaccacttgcgggtatgtgtgaatcggcaggtatggactatgaggaaaaagcttcgttagacttcctgtttggctgatagaataaatctagggacctccgggtccctttttcatacaagtaatataaatctatacttatgaaaaagagatgattctggaccctttggattccctaaaaattttttcacaaaactgtttacatccctgttcttctatggtactatacaactatcaactactgatacggatttggagaatgaaatgaaaatcgctattttggttattgcattaggtcttgctggttgtgtagctcaaggaccggtagtaaatcagtctgatgtaggaaaaattgtaaactgttcaagcaaattttataatcctaatgtcaagtgttataaagaagctccaaaacagacagtagaacaaatgcaggcgaattttgacgaagctattcgtccagatgaatctgctcaagcatatcgtaattcggatgtaattacacgcgaagaaaaaattgaaagttactgtgccaaactttgggctaattgggctaataattatcaatggcgtactggtaaaaatgctccgatggagtatgtagtaaattcttataattcatgcgtaaaaaatttgactaagtgaggaaaacatggaaactttagtagcaggttcaatttttatggttttagtttcaggtgtgttggctattattatatacatgctcccatggttcatcgccttgatgcgtgggtcaaaatcgacagtaggaatcttttttacatctttactgtttaactggtcaatcattggttggtttattacatttatttggtcaattgcgggtgaaaccaaaaagtctgcacagccaaatcaagtaattatcatcagagagaaggaatgaaaagcaaaattatagcagtgttgcttttaatcttgatgattataataagtatatactatagtgtaacggttcctcttatgattccaactattattttaggttggggtttattactgttacaagttaaatatgaatgtatcaattgaggtttaaatgattaatgactctttgacagttgaagaaactcgtcttcatttgggaattgcgttaaaggaaaaagatttcgtaattgataaaaccggtgttaaaactattgaaattattggcgcatcatttgtagcagatgaaccgtttatttttggcgctcttaatgatgaatacattcagcgtgaacttgaatggtataaatctaagagcttgtttgttaaagatattccaggtgaaacaccaaagatttggcagcagatagcatcttctaaaggcgaaattaactcgaattatggttgggccatctggtcagaagataactatgctcagtatgacatgtgtttagctgaacttggtcaaaatcctgattctcgacgtggtatcatgatttatactcgtccatccatgcagtttgactacaataaagatggtatgtcagatttcatgtgtacgaatacagtacagtatctgattcgtgataagaaagtcaatgcagtagttaacatgcgctcaaatgacgtggtcttcggattccgcaatgattatgcgtggcaaaaatacgtactagataaattagtatctgatttgaatgcaggtgattcaactcgccagtataaagcgggttctattatatggaatgtcggaagtcttcatgtgtattcccgtcatttttacttggttgaccattggtggaaaactggcgaaactcatattgcgaaaaaagattataacggtgagtggaaatgattcaattcgtaattccaagctatcaacgtgtaggggcagtttctgcccttgatatgtttccgactgattatgaaccccatattgtagtgcgtgaacacgaagaaaaagcttattatgatgcctatgggtctagagctaaaattgtaactattcctgatgatgttaatggaattgccggtactcgtaaagcaattactgatatgtatgcaggtcaacgaatctggatgattgacgatgatactactatccgtatgagttcaatacgaaagagagacgataaacggcgcgtagataaaattaatcaattaactcgtgaacagttctatgaattgattcaatacgtcgaagatgccatggattgcgggtattatcatggccatgctcgtctacctatttttaaaattacttcatcttggggtaattatcgtgaaaattcatatggattcacgaatacatggtatgacctcggaaaacttacgacagaacaaattgggtatggaaaaattgatttatgcgaagatatgtatgcatttctcaatttaattaatcaaggttatccgcatttggccttgttcaaatatctggttgtatctggaaaagcacaagctcctggcgggtgcagttcaattcgtagtaattctaaacataatagagcgcttgagcaaatcaatagagagtttccagagcaagctcgttggaaaacttctaatatcgaaaaacgaaaatcgttgggtgaagaagacgagccattaaaggttcttcgcatgcgtgtttcgcgcaaagaaaaatcagaagcatttcataagtttaatgctattcatccgatagcagttgattaatgcctaaatttattgtgttataattactctatctttaaccagtgaggaaaatataatgatgcctatggaaaaaatgaatgtctattgcagatttaaaatcccgtttgattaaagcttccacttctaaaatgactgctgaactgactacatctaaattctttaatgaaaaggatgtaattcgtacaaaaattccaatgcttaatatcgctatttccggtgcgattgatggtggaatgcagtccggtttaactattttcgcaggtccttctaaacactttaaatcaaatatgtctttgactatggttgcggcgtatttgaacaaatatcctgacgcagtttgtttattctatgatagcgaatttggtattactccagcttatttgcgatccatgggagttgacccggaacgagtaattcatacgccaattcagtcagttgaacaactgaaaattgatatggtgaatcagcttgaagctattgagcgcggtgaaaaagttattgtattcatcgactcaatcggtaatatggcttctaagaaagaaacggaagatgccttgaatgaaaaatctgtggcagatatgactcgtgctaaatcactgaagtcattattccgtattgttactccttattttagtattaaaaacattccatgcgttgcggttaaccatacaattgaaacaattgaaatgtttagtaaaaccgtgatgacaggtggtacaggcgtaatgtattcggctgatactgtgttcattatcggtaagcgtcagattaaagatggttctgatcttcaagggtatcaatttgttctaaatgtagaaaaatctcgtaccgttaaagaaaaaagtaaattctttattgatgttaaatttgacggtggtatcgatccttattctggattgttagatatggctcttgaattaggatttgtagtaaaacctaaaaatggctggtatgctcgtgaatttcttgatgaagaaaccggcgagatgattcgcgaagaaaaatcttggcgcgcaaaagataccaattgcactacattctggggtcctttatttaaacatcagccattccgagatgctattaaacgtgcttatcaattaggtgctattgatagtaatgaaattgttgaagctgaagttgatgaattaattaactcaaaggttgaaaaatttaaatctccagaaagtaaaagtaaatcagcagctgatttagaaactgacctagatcagttaagtgatatggaagaatttaatgaataaagatgatttagatttagaaattatcgacgaatccccctcttcggagggggaagaagaaagaaaagaacgtctttttaatgaatcccttaagataattaaatctgccatggaaaatgttatccaggagattgtcattaaactagaagatggttctacacacattgtgtatgtgacaaaattagattgggttgatggaaaagtcgtaatggactttgctgttcttgaccaagaaagaaaagctgagttagctcctcatgtagaaaagtgtattacaatgcaactacaagatgcatttaataaaaggtcaaagaaaaaatttaaattcttttaaggagtaagtgtggtagaaattattctttctcatctcatatttgatcaagcttatttttcaaaagtttggccatatatggattcagaatattttgaaagtggtccagctaaaaatacattcaaattaattaaatctcatgttaacgagtaccatagcgttccatctattaatgcgttaaatgttgcattagaaaatagttcatttactgaaacagaatattctggtgtaaaaacacttatttcgaaactaaccgattctccagaagaccacagctggttagtaaaagaaacagaaaaatatgttcagcaaagggcgatgtttaacgccacatctaaaataattgaaattcaaactaatgctgagcttcctccagaaaaacgaaataagaaaatgccagatgtaggtgctattcctgacatcatgcgccaagcattatcaatttcatttgatagctacgttggccatgattggatggatgactacgaagcacgttggctatcttatatgaataaagctcgtaaggttccatttaaactcaaaattctaaataaaattactaaaggcggagctgagactggaacactgaacgttttaatggctggtgttaacgttggtaaatcattaggattgtgttcattggcagcagattatttgcagctcggacataatgttctttacatttcaatggaaatggcagaagaagtctgtgctaaacgtattgacgctaatatgctcgatgtttctcttgatgacattgatgatgggcatatttcttacgctgaatataaaggaaaaatggaaaaatggcgtgagaaatctactcttggccgtttaatcgttaaacagtatcctactggtggagcagacgctaatacatttcgatcgcttttaaacgaattaaagctcaagaagaattttgttccaacaatcattattgttgactatctaggtatttgtaaatcttgccgcatcagagtttattcagaaaatagttacacaactgttaaagctatcgcagaggaattgcgtgctctggcggttgaaaccgaaactgttctttggactgcagcacaggttggtaagcaagcttgggattcttctgatgttaacatgagcgatattgcagaatctgccggtcttccagcaacagccgattttatgcttgcggtcattgaaaccgaggagttagcagctgctgaacagcaactcattaagcaaatcaaatcacgatatggtgataagaataaatggaataagtttttgatgggggttcaaaaaggaaatcaaaaatgggtagaaattgagcaagattctactccaaccgaagtgaacgaagtagcaggttcgcagcagattcaggctgagcagaatcgctatcaaagaaacgaatctactcgagcccagttagatgctttggcaaatgaattaaaattttagtttacaagctgacaagactatggtatagtagtcttgttggttaaatgaggagattgttatggaattggtaaaggtagtttttatggggtggtttaagaatgaaagcatgtttactaaagaaatcacaatgatgaaagacgacgttcaatgggctactactcaatatgctgaagttaataaagcattagttaaagctttcattgatgacaagaaagtatgcgaagtggattgccgaggataatatgcacattgttttatttaaacctactccgtataatgtcaggaaaaatactcaattcaaagcacttgttgcagatacgtgggaattggtgttagatattccagcagaagaaagccctccatttggtcgagtggaatttattaagtttgctgtgcgccctacgaagcgacagattcgccaatgcaaaagatactttcgtaaaatcgtcaagttagagaaatagttattgatgctagtaaaatagtagtttacaagctgatagagttgtgttatagtaattctatcagctaatcgcggagaaaagaaaatgatgctagttaatagagaatatcagtttaaatcagaagaagatttggaaaaattcgcaagtggttgtgaactgaatagacgcacagctaaagtcataggattaaaaccctttacagttctagattgtgaagtttctaaattccgcagagggtgttctattagcggtcatgctctggttgatgggaacacatttttctttgtttttagcgtcagagaacttttattgattaacgaacttgaggaaataaaatagtttacttttgttggaaattgagatactattataaacataaactactgaggagattatcatgaaaaaatttgtttttgctgcaatttttgctttggcttcttgtactgctcagcctgctatggcaggttatgataaagatttgtgtgagtggtctatgactgcagatcagactgaggttgaaactcaaattgaagcggatattatgaatatcgttgagcgtgatcgccctgaaatgaaagctgaagtacaaaaacagcttaagtctggtggtgtaatgcagtataattacgttctgtattgtgataaaaacttcaataataaaaatatcatcgctgaagtggtaggtgaataattagaggctaatatgaaaacgtttaaagaatttattaaagaagatatggtagctggagattcaggtggtaatcctgaaaatatctctactggaacaacgtcaggtgctgtagtaaataaaggtcctgaacagattcctaaaaagaaaaaagaggaatctaaagaaaaagaagagtaaaaatgtcatcaataccttggattgataatgagtttgcataccgtgcattggctcatttacctaaattcgcgcaagtaaataatagttcaacttttaaattacggtttagatgtcccgtttgtggagattcaaaaaccgatcaaaataaagcccgtggatggtattatggcgataataatgaaggaaatattcattgttataactgcaactatcatgcaccaatcggaatatatttaaaggagtttgaacctgatttatatcgtgagtatatctttgaaataagaaaagaaaaaggtaaaagtcgtccagtagaaaaacctaaagaacttcctaaacaacctgagaagaaaataattaaatctcttccgtcatgcattagattagataaactggcggaagaccatccaattataaaatacgtaaaagctcgttgtattccaaaggacaaatggaaatatctttggtttacaaccgaatggcctaaattagttaatagcatagcaccgggaacatataaaaaggaaatacctgagcctcgtcttgttattccaatttataatgctaatggaaaagctgagtcttttcaaggacgtgcattaaagaaagatgctcctcaaaaatatatcaccatcaaagcttatcctgaggcaacaaaaatatatggagtcgaacgagttaaaaatggtgatgtatatgttctagaaggacctatagattcactttttattgaaaatggtatagctattacgggtggtcaattagacctagaagttgttccatttaaagatagacgagtgtgggtcttagataatgaacctcgtcaccctgacactattaaacgaatgactaaattagttgatgcaggagaaagggttatgttttgggataaatctccctggaaatcaaaagatgttaatgatatgattagaaaggaaggtgcaacccctgaacaaattatggaatatatgaaaaataatattgcccaggggttaatggctaaaatgcggctatctaaatatgctaagatttaaattaacccaactaaagcaaatgctaaatctacgaatgtatcaagagtaactactggaatactaacgccatgagcaatagcaactggcgataaaacaaaattccaaagtaaaattcctatcatagcagaaatagtaaaagctatacgttttttattaccttttatggcattaacaagtgccattaatttttgtaccatatgtcctccttattgctttatatatttattgtataattaatctactaacccatgaattgaaaggaaaaataatggcttactttaatgaatgttcgcaactgatcgaaggcgctgataaagctcaaaatgaatactgggatattctcggtgatgaaaaagacccactgcaagttatgcttgatatgcagaaatctttgcaggttcgtttagcaaatgaccgcgaatactgctaccatccagataaattagaaactgccggtgatgttgtttcttggatgcgtgaacaaaaagactgtattgatgatgaattccgcgaacttctgacttctcttggtgaaatgtcacgtggtgaaaaagatgcatccgcagtttggaaaaaatggaaagcacgttatattgaagcgcaagaaaaacgcattgatgaaatgtccccagaagatcagcttgaaattaaatttgagcttgtggatatatttcatttcgtattaaatatgtttgctggccttggaatgaatgcggaagaaatctttaaactttattatttgaaaaataaacataattttgaacgtcaagataatgggtattaaacaaaaattttatagaacatatatagtaaaagttaggacgccgaaaggcgtcttttggtacgctgggaaacatgaatcatttattgtaaatccatatgatgataaatatccgggttcaggcaaaatattatggaacatatatcgtaagtatggttttaattataaaatacgttggtcaaaatgccatggttctagagaaaaatcatatgaagttgaacgcgagctaatatctgcattaaaacgtaaacacccagatacttgcattaatatttctcctggtggtcagggtggagaaggaagaaaatggactgagcaacaacgattagaacataaacttagattaaacaaccctgaaacaaaaactcggatgaagaattcacaacgtatagcccaaaatagagcagaacgaaaagctcggcaatctgaagtaatgaaaaagttttattcgaatggcggaaataaaaagatttcagaaggaacttcaagggcgcaaagaaaagcaccgcattggcatgaaccgcttaaaagcgaaatacacgagttatgggtttctttaggtaaaccagcaacaggcccggttgtaaaggcgcttaaaggaaaatatgatgtaacaagttcagctcttaagaatttaatttacttattcagaaaagaagatgtataaataatcatgtaatttaaataaaaggagaattacatggctagtactcgcggttatgttaatatcaaaacgtttgagcagaaattagatggaaataagaaaattgaaggaaaggaaatttctgtagctttccctctttattctgacgttcacaaaatttctggtgctcattaccagatattcccttcagaaaaagcagcatatactactgtatacgaagaaaatcaacgtgatgcatggattgctgcaaacgaagatctgtggaaagtaactggtggttaataattcaaggactccttcgggagtccttttttcattttaccagtttactttccaaaatgagtatggtataatagaattatcttatagaggagagcactatgttaaatcgttggattaaaccaaatgaagatttagatattatcatttcacggcatgtaatgaagaaatatgaattgcaaccatggtctacagaagttgttgtgcattcatttatgatgtacgcagatggttctgttgaatttaacgcagagattcgatatgattatggcgataagcaagtcgaattcaaaagaggctttttgtaatgtttatctttaattggtttaaaagtttctttaaagattttttctctacgactcctggagaaggtgtagttcctatttcaaatgactatcttcctttaactgtagttgaatatgtttatatgggagatggaacagtagaagcagttactatgacttatgaagaagcccaagaatattataaaaatccttggcgctggtcaacacctactacatcatctaatacgcagaatacacagtctagttctgattcatatgacactaatgttcctgttcatgtatggacgggcgattcatgtggaaattcttgtgattctagttgttcatctacatcttgtgattgaggaaaattatggaagcgattttgtttgaaatgtatattagcagtaatagtatgtcgtttgctaaagacgttccaattaccgtagcagtaatgattgataagggttattgtgacccaatgtatctcgtagaaaattttgtttcaatgccagttccagaagatgctgaaataaaacttaaaaagatcggaattattgaaactgtaccaaatattccgtttagagcaattgaagcatttactaaatccgaatacatcaatgttagcgcagaacaatataatgataaacctttatctttctattcgtatgattcagtatatagctggaaaatagataaaggaaataaatttataattgtgagtgaagatgctttatcatactttatttcttctgtatggaatagtttacatccaaatttgctaaaaattcatgaatttgatgatgctcctactgttgttttaggtaaaacaaatgaaagttctgaagaaaatgcttgaatggttcagtagaccaaactcaatgtacattgatgatggttgggttgaacaagcaaataaagaaatgcagaacgaatcagaagaatggatgaaatcaatgattagtgctgagaaagaaaagaaattagaacgctcagcgcttaaattgatgagagacatctatggggataaatcgtgaacagagatatgacgctagaagaggccaaggctaaagcaaatgaagcattggatttgcttcttaaaattggcagtaaaatgatggaagaaaatgagaaatatatccaggaaaacaaaattcctgacggcccattagtaggcaagaggaaatcacatgattgaagtagcaaaacattattcaatagaatttatgtctaaagaaggtaaatcagtaaatacacttgacaaaaagtgctcattaattattcctttagcagaaaatccggatattttaattaaagatataaaagaaagaaaatacccagaaaatgttattctaattataaagcatactgaagatattttgcagaatactgattcaccgttttcttcttctgaagctttaactattaaaggctataaaagagctcatgaatatggtctttttgacctgtttgaagacgataaagttaaattagcgagtcaaccttctaaaagtaaaacattcattattgaagatattaaagatataaatgcattcgttaagatggtctgggctcattttgatgttggactacgctggagaatgtccgaagaagaaagaaagattattgaagctaatcgtcaatttggtttttatcgctaggaattaatatggatttatttgagatgttagaagataatcattctacgaatatccagaatgattctagtgattataagaaagagtaccgtatagtattacagaattatggaattgaagccccagatgctcttctagaagaactagcttcataccatcttgaccctccgccctgggctccctgggcaaaataattcaaaaagttgtttactttcctttctaacgatgatatgatagcttctgaagtatacggaggctatcatgattattaatcttgcagatgttgaacagttatctataaaagctgaaagcgttgattttcaatatgatatgtataaaaaggtctgtgaaaaatttactgactttgagcagtctgttctttggcaatgtatggaagctaaaaagaatgaagagcttcatcggcaattgaataaaatcattaaaaagcatttaactaaatcgccttatcagttatatcgtggtatatcaaaatcgacaaaagaacttattaaagatttacaagttggagaagtgttttcaacgaacagggtagattcatttactactagtttgctcacagcatgttctttttcttatgctgaatattttactaaaataatacttcgcttaaaaactaataaagcttttaattattctgaccatatcagcgatattatactttcttctcctaatactgagtttaagtacacatatgaagatactgatggattagattcagagcgtactgataacttaatgatgattgtgcgtgaacaggaatggatgattccaattggaaagtatagaataacttctatttcaaaagaaaaattacacgattcatttggaacatttaaagtttatgatattgaggtagttgaatgaaatactcagtaatgcaactaaaagattttaaaataaaatcaatggatgcatcagtgcgtgcttctattcgtgaagaattactttctgaagggtttaatttatctgaaattgaacttttaattcattgtattactaataagccagatgaccatacttggttaaatgaaataatcaaatctcgtttggttccaaacgataaacctctttggagaggtgttccagtcgagactaagcaagtgttaaatcaaggaattgatattattacatttgataaagtagtatcagcttcatatgataaaaatatagctctacattttgcttccggtttagagtataacacacaggttatttttgaattcaaagctcctatggtattcaatttccaggagtatgctataaaagctctacgctgtaaagaatacaatccaaactttaagtttccggatagccatcgttatcgtaatatggaattagtttcagatgaacaagaagtaatgataccagctggaagtgtatttaaaattgcagatagatatgagtacaaaaagtattcaacatacactatctatactcttgattttgaaggatttaatctataatggaaggacttagattcattataccatgaaagttttaaagcatttttcataaagttgtttacaagttaaagtaaaaatgttatagtataagtagttaaccgtccgtaagatgtgagaaaaatatgaagctgtctaataatcaaattcgtaaaattaaacgtcgtttagagcatactcaggcatccgcaaaaagacgttctaaagattttaacttagacttcaattacattaagaacattttagatcaaaaagtttgtgcttactcgggagaaccttttgataatcgtattgaaggagagaaattatcattagaacgttttgataataacgttggatatattaaagggaatgttattgcagtaaagaaaaagtataatacatttcgttctgattatactttagaagagttgatcgaaaagcgtgatttgtttgctttgcgaattggtcgttcatctgcgaaaaaagttcataaactaaatttagatgaaaagaaatgggctaaaatcaaaaagacttataatcaaattaaagctatacagaaaaaacgtgaaaaccgaattgaacacatttctcagctttctaaatcaaaacagacctctgacattaagctaagaattatagcacttaaagcacgtattgatggttctcgcatagcagaaggcgctgaagttgttaaattgaacgttcttcttaaaggctcggattggaaaattgtgaaaaagttgtcagaagcagaaatgcaatatgatatgtgtgataaaattattcaaggtgtagagcggtatcaaaatttgtcttttattgataaacttaaactgaaaagaggatacccgctaaattgttcaatttttaaacttatccgaggataatatggtttatgtatacgcgatagtttaccgagacaaagacggatttacggcgccagttccgcttgatgaacatcgtcctgctgtattttttgaatggaatattgctgataaagtatttactactcttaaagagcagtatcgactagctttaggtaagggaattccaagattagttgagactccacgtaaattttggtttaataaaatagaagttaaacatgttaagcctgatgtagacacacaaagattatatcagcgaattttagatactgggcgtattgttagtattccaattgcagggactttccgatgacatttgatgatttgaccgaaggccagaaaaatgcctttaatattgttatgaaggctattaaagaaaagaaacatcatgtaactattaatggacctgctggtaccggtaagactactcttactaagttcatcattgaagctttaatatctacgggtgaaactggtattattttagcagctcctactcatgcagctaaaaagattctttcaaaactatcagggaaagaagcaagtactattcatagtattcttaaaattaacccagtaacatatgaagaaaatgttctttttgagcagaaggaagtaccagatttagctaaatgcagggtattaatctgcgacgaagtgtcaatgtatgatagaaagctatttaaaattctgctttcaactatcccgccgtggtgtactataattggaataggtgataataagcaaattagacctgttgacccaggagaaaacattgcttatatcagtccattctttacacataaagatttttatcagtgtgaactcactgaagttaaacgcagtaatgctcctattattgatgtagctactgatgttcgcaacggtaagtggatttatgataaagttgttgacggtcatggagtacgtggatttaccggtgataccgctttacgcgattttatggtaaattatttttcaatcgtcaaatctttagatgatttgtttgaaaatcgcgtaatggcatttacgaataaatctgttgacaagttaaatagcattattcgtaaaaagatttttgaaactgataaagattttattgtcggtgaaattattgtaatgcaggaaccattaattaaaacatataaaattgatggaaagcctgtgtcagaaattatttttaataacggacaattagttcgtattatagaagcagagtatacatcaacctttgttaaagctcgtggtgtttctggagaatatctaattcgtcattgggatttaacagtagaaacttacggcgatgatgaatattatcgtgaaaagattaaaataatttcatctgatgaagagcggtataagtttaacttatttttaggtaaaacggcagaaacttataaaaattggaacaaaggcggaaaagctccgtggagtgatttttgggatgctaaatcacagtttagtaaagtgaaagcacttcctgcatcaacattccataaagctcagggtatgtctgtagaccgtgctttcatctatacgccttgtattcattatgcagatgctgaattagctcaacaacttctttacgttggtgtaacacgtggtcgttatgatgtgttttatgtgtgaggctatatgattaacatcaattcaaaatatttaaatcgtctaatagatggtataaggaagcatactaataagcaagataatctcgatgttatggtaacaggagctgagctccttcataagctttatcttataagtgatactatattagcaattaaacgaattgaaaaacaatcatatcacagtaatacagatacggtaattacactagatgaaagtgtctgtaaattactaattaaatttgaggaagctattcgtggaaataactaaagaccagttttatctgcttcaagataaagtgagcgaaatttatgaaatagcttatagtaaaaatcgtagaaatgtaaaaattgaatcaggcaagttaatgcttcaattggaagaaattgaacgagatttgattgcgttagaattcttttgcggtgaagtgaaaactgtcacaatcagtgattatgctttaggtgaaattagccatctttataaggcggttattaatgattgaattaagtttgcatcagtttaaatctcttatgacaaatgttaaagctgtcattgaggaaaattctagtcctgaaaatattactattcgcgaaaaagctttaaagatagtatacagtcttgaagagatacaaaaagatattgaatctatggcaaaatttattgatgagcctattaataaagtttatatccaagattatactgtaggtcaaattcgcgatttagcaaggaaaatttaatgtttgattttattatagattttgaaacaatgggaagcggtgaaaaagcagctgttattgatttggctgtaattgcttttgaccctaatccagaagtcgttgaaacatttgatgaattagtttcacgtggcattaaaatcaaatttgatttaaaaagccaaaaaggacatcgtctttttactaaaagcactatcgaatggtggaagaatcaatctcctgaagctcgaaaaaatattgcgccatcagatgaagatgtaagcactatcgatggtattgcaaaatttaatgattacatcaatgcgcataatatcgatccttggaaatctcaaggctggtgccgtggaatgtcgtttgattttccaattttagtcgatctcattcgcgatattcaacgtcttaacggcgtttccgagaatgagcttgatacatttaagttagaaccttgtaaattttggaatcagcgtgatattcgtaccagaattgaagcacttctacttgttcgtgatatgacaacgtgtccccttccaaagggaactttagatggatttgttgcgcataattctattcatgactgtgcgaaagacatcctgatgatgaagtatgctttgcgatacgctatgggtcttgaagatgctccatcagaggaagagtgcgatcctctgtctcttccaacaaaacgataaaaagttgtttacttcctcggttagttgtggtattataacaccatagctactgaggataataaaatgaaaatttatcgtgttgaatcatcgtttagtattcttgattatgaagatgctataacaatacgtcgaaatctttgtgttcaaataacgccgtataggagtataatagattcatggagcgaagagtggctattacacgtaggttatgacagacctaattttatgcatcatagcgataataataaaagaattcctttaccacacgaagataaactattagttaaaaacgctaatatagtaattaatactaagttcaagaaagattatgttggagtagaatatcatattccaggatggtttataggtctttatcattttgctttcgctagtgaatatgatatgatgagatggttcacacgagaagagcgtgaagaattagcttctaaaggattttatcttgctgtatacgaagtgccagatgaccaagttatcattggcggacatcaagtaatgttccgtaaatcccatgctgaactcgtagattttattgaaatgagataattatgaaatttaattataatcctgaatacataccaaatccggtagctaaactgattgattttgatgttgtaagcacttatgtatgccctgttaaaccgctggaaattaaggaacctactatgactaccgctattgaaatcggcaaaacctacaaactggttgaacctaaaattaaaactaatgccttgatttccggtcataaaactctgactgatgtttttggcgaaggcgaatttattgttgaagaatttgccaaaagtgagtggtttgacaaatcttacgtcatccacggtcgccggttagataataacaaaataaagaaaaacctggtttatgaagatgagttcatcctgttccaagaagttgaagaacaagaccctaccgaccttctaactcatgcggtagctatcaagactccatttatttcggtctgtggttgggtaacagaccaatggattgaagatggtgttgaacttctgaacgttgttcatgcaggtgattttagcgtagtacctcgtagtgcagtggtagctattttgaattaatagtttacaaactcttgggaccagagtataatggtcccgcggagtataaaatctttttaacaagtgagaaataactatgattattaatattggtgaaattgctcgtgtatctgataaatcccgttctaaagcagcaggaaaattggtcgaaattgtaagcattcagcttaaacacggcgttaaagatgaagattctgaagtaaaagtgcgtatcattcctaaagatggaaagtctaaacctcagtttggttatgttcgcgcgaaatttcttgaatctgcgtttttgaaagctgttcctgctaaaggaattgaaacgattgatacttcacatgtaggtgtagactttaagtggaaacttggtcaagctatcaagttcattgctccttatgagtttgaatttaccgaaggtggacaaccacttcctcagcgtactcgcgctatgtgtgcatacattactgatcaatgggtagaagatggtgttaagctgtacaatgtggtatttttaggaacatacaaagtcattcctgaaagttggattaaacactacagcaaagctcgctatgcataaagtttaaaattttttcataaaactatatacatcagtagttgattatggtactatatcaatatcaactactgatacagaaaacaacttgaagaataaaatggataattcgttaaaggtgctgatactcttctgaaacgcatctctccaatgttcaattaatgaggaaattatgatgaaacgtaaaattgttcagaattgcactaatgatgaatttgaagatgtattattcgatccagatttggtagtagttcaaaaggaacatactagcaagtttactcacttgacttcggtttatgtgtatgagaaagtcggtgataaacaaccaatttacggtgtatttcgtgaaattactgaagatggcacaacttactggaaggaaatttattaatggctattaaatttgaagttaataaatggtatcaatttaaaaataaacaagctcaagaaaattttattaaagaccatactgataacggaatctatgcacgacgtttaggtatggagccttttaaaattttagatgctgattatcttgggcgtcctactaaaattatgacatctactggcacagttggatatgcaacacatggtgatatccttgacgaaaactttatctggctttctactaacgaagctgggttctttgatgaagtggaaaatccatatcaggcagttgaagagaaagagcaggaagagaaagagcaagaacaaatagaagatttcacagaattcccggtcatgaaagttactattgaaaataatgaacaggcatggtccttgtatcagatgttgaaagctcactttaaggaataattatgcctctttatgattataaatgtcaatccaaagactgtgcaaaagaatacgaaaaaatcaagaaaatttctgaaagggatactgatgtatgtcctgattgtcatcggattgctattcggttagtttctgctcctaagcatgtgaatggcggattttacgacttgcttaaagggtaattatgaaatatattaatcgttctatcgcagcattagtattagcagtgtctttaataggatgtactgatgctgataatgcaaccaaagttttgtcttcaagtggttttactaatattgaaatcactggatataattggttcggttgctctgaaaatgatttccaacatactggatttcgtgctattggacctactgggcagaaagtagaaggaacagtatgttctgggctgttctttaaggattcaactattcgttttaaataaaaggccttcgggcctttagctttatgattaccggagtataatattcccgaaaccaaacgaggataagtgatgattaagaatgaaattaaaattctgagcgatattgaacatatcaaaaagcgtagtggcatgtacattggctcttctgctaatgaaatgcatgagcgctttctgtttggtaaatgggaaagtgttcagtatgtacctggtcttgttaagcttattgatgaaattatcgataactcagtagatgaaggtattcgtactaagtttaaattcgcaaataaaattaatgttactattaaaaacaatcaagtaacagttgaagataacggtcgtggtattccgcaggcgatggttaaaacacctaccggtgaagaaattcctggtcctgttgctgcatggactattccaaaagcaggtggtaactttggtgatgataaagaacgtgtcactggcggtatgaatggtgttggttctagtttgacaaacattttttctgtgatgtttgtcggtgaaactggtgatggtcaaaataatattgtagttcgttgttcaaatggcatggaaaataaatcatgggaaactattcctggaaaatggaaaggaactcgtgttactttcattcctgattttatgtcatttgaaactaatgagctgtcacaagtttatcttgacattacactagatcgtctccagacacttgcagtagtttatcctgatattcaatttacctttaatggtaaaaaggttcagggcaattttaagaaatatgcacgccaatatgatgagcatgctattgttcaggaacaagaaaattgttctattgcggttggtcgttcaccggatggttttcgtcaattaacttatgtgaataacattcacactaagaatggtggccatcacattgactgtgttatggatgatatttgtgaagaccttattccacaaatcaaacgtaagtttaaaattgatgtaactaaagcacgtgttaaagaatgtttgactatcgttatgtttgttcgtgatatgaaaaacatgcgatttgattctcaaactaaagagcgtttgacttctccatttggcgaaattcgtagtcatattcagcttgatgctaaaaagatttcacgcgctattctaaataatgaagctattttgatgccaattattgaagctgccttggctcgtaaattggcagcagaaaaagcagcagaaactaaagcagctaaaaaggcttctaaagctaaagttcataaacatatcaaagcgaatctttgcggtaaagatgctgacactactcttttcttgactgagggtgattctgctatcgggtatcttattgatgttcgtgataaagaacttcatggtggttatccattgcgtggtaaagttctcaacagttggggtatgtcatatgcagatatgcttaaaaacaaagaactatttgatatttgcgcaatcactggattagttcttggtgaaaaagctgaaaacttgaattatcataatattgctattatgaccgatgctgaccatgatggtttaggaagcatttatccttctctgctcgggttttttagtaattggccagaattgtttgagcaaggacgaattcgctttgtcaaaactcctgtaatcatcgctcaggtcggtaaaaaacaagaatggttttatacagtcgctgaatatgagagtgccaaagatgctctacctaaacatagcatccgttatattaaaggacttggctctttggaaaaatctgaatatcgtgagatgattcaaaacccagtatatgatgttgttaaacttcctgagaactggaaagagctctttgaaatgctcatgggagataatgctgaccttcgtaaagaatggatgagccagtagtttactttaccacaaggatgtggtataattaattgggcaaatgaggatattggaatgaaatcatataaagtaaatttagaactttttgataaagcagttcatcgagaatatagaatcattcaacgctttttcgatatgggagaagccgaagaatttaaaaaccgctttaaagatattagagataaaattcaatccgacactgcaactaaagatgaattactagaagttgctgaagttattaagcgtaatatgaattaatgaggaaattatgattatcaccactgaaaaagaaacaattcttggtaatggttctaaatcaaaagcatttagcatcacagcatctcctaaagtatttaaaattctgtcatctgatttgtatacaaacaagattcgcgcagtagtccgtgaattgattactaacatgattgatgcccatgctctcaatggaaatcctgaaaaatttatcattcaagttcctggacgtttagatccacgatttgtttgccgagattttggtccgggtatgagtgattttgatattcagggtgatgataattctcctggtttgtataattcatacttcagttcatctaaggctgaatctaacgatttcattggcggatttggtttaggttctaaatctccgtttagttatactgatacatttagtattacttcgtatcataaaggtgaaattcgtggttatgttgcttacatggatggcgatggtccgcaaattaaacctacattcgtaaaagaaatgggtccagatgataaaactggtattgaaatcgtagttccagttgaagaaaaagactttagaaactttgcttatgaagtttcttatatcatgcgaccattcaaagatttggctatcattaatggtcttgaccgcgaaattgattattttccggattttgatgactattacggtgtaaatccagaaagatactggccagatcgtggtggattatatgctatctatggtggtattgtttatcctattgatggcgttattagagaccgtaactggttaagcattcgtaatgaagtgaattacattaagtttccaatgggttcacttgatattgctccatcgcgtgaggctctttcgctggatgatcgtactcgtaaaaatattattgaacgagttaaagaactcagtgagaaagcatttaatgaagatgtaaaacgatttaaagaatctacatctcctcgtcatacatatcgtgaattgatgaagatggggtattctgctcgagattatatgattagtaattcagtcaaattcacgactaaaaatctgtcatataagaagatgcagagcatgtttgaacctgacagtaagttatgcaatgcaggagttgtgtatgaagtaaatcttgaccctcgactgaaacgcattaagcaaagtcatgaaacttcagccgttgcatcaagttatcgtctgtttggcattaatacaacaaaaattaatattgttattgataatattaaaaatcgtgttaatattgtccgtggattagcacatgcgctagatgatagtgaatttaataacactttaaatattcatcacaatgagcgtcttctgtttattaatccggaagtagaatcgcagattgatttactacctgatattatggcaatgtttgaaagtgatgaagttaacattcattatttgtcagaaattgaagctttagttaaaagctatattccaaaggtagttaaaagtaaagctcctcgtcctaaagctgctacagcatttaagtttgaaattaaagatgggcgttgggaaaaagaggaattatttacacttacgtcagaagcagatgaaattactggttatgtagcgtatatgcatcgttctgatattttctctatggatggtactacatcactttgtcatccatctatgaatattttgattcgtatggctaatcttattggcattaatgaattttatgttattcgtccgcttttacagaaaaaggtaaaagaactcggtcagtgccaatgtatttttgaagctttgcgtgatttatatgtagatgcttttgatgatgtagattatgataagtatgtaggttattcaagttcagctcaacgatatattgataaaattatcaagtatcctgaactagattttatgatgaagtacttcagtacagatgaagtttctgaagaatatacacgacttggtaatatggttagttcattacgcggtgtatatttcaatggtggaaaagataccatcggtcatgatatctggacagtaactaatctctttgatgaattatcacgtaatgcttcaaaaaatagtgataaaatggttgctgagtttaccaagaaattccgtattgtttccgacttcatcggttatcgcaactctttaagtgatgatgaagtttcccaaatcgctaaaactatgaaggcccttgcggcttaataaggaaaattatgtacaatattaaatgcctgaccaaaaacgaacaagctgaaattgttaaactgtattcaagtggtaattacacccaacaggaattggctgattggcaaggtgtatcggttgacacaattcgtcgtgttttgaaaaatgctgaagaagctgagcgttccaaagttaccattagcggtgacattacagttgaagttaaaagtgatgtagctattgctccagttgctaaatctgacattatttggaatgcatctaaaaaattcatttcaattactgttgatggcgtaacttataacgcaactcctaatactcattcaaacttccaggaaattcttaatctgcttgttgaagataaattggaagaagcagcgcaaaaaattaatgttcgtcgcgctgttgaaaaatatatttccggcgatgttcgaattgaaggcggaagcttgttctatcaaaatatcgaattacggtctggtttagttgatcgtattctcgattcgatggaaaaaggtgaaaactttgaattttattttccgttcttggaaaatctgctggaaaacccaagccagaaagcggtatctcgactctttgatttcttggtagcaaacgatattgaaattacagaagacggttacttctatgcttggaaagtagttcgcagtaattactttgactgccattcaaatacttttgataacagtcctggtaaagtagttaaaatgccgcgtactcgtgtgaatgacgatgatacacaaacttgttctcgtggtctgcatgtgtgttctaaatcttatattcgtcactttggcagttcaaccagccgagttgtaaaagttaaagtacatccacgtgatgtagtatcaattccgattgattacaacgatgctaaaatgcgtacctgccaatacgaagtagttgaagacgttactgaacaatttaaataagggctttggcccttaactaaggaaaattatgttaggttatcaagcacgagtaaaagaagaatacgatcaattaatgctcaaaattaatgcactgggcaaatttttagaaagcacaaagtttctaacagttagtgcagttgagcaagaacttctactttcacagttcatctcaatgaaatcttacgcagagtgtttagaaaaaagaattgcacaattcaaataaaataaggggcttcggcccttttgttttaagggaaactatgatttattgtatgaatatcagtgattccgacgtaaaaggaaagtttaatgcagaaaacgaatccgggtttacagagactatttcagattccgacatttaccctatcgaacagtgacttgactagtgaaatgaaggtcaaaattgctgatacagcaagatactctttaaaacaaaatccaaatcaggataaggcagaagttatcgaaagatgccgtattgctgtgtacgcagagttttttgtagcagattggctgagcgggtatgttaacaaaggtcaagaggatgttaatgatccgtacacatatgcatgggatgtattggcgcatccaagatactgcgggcttcgtgtagaagttaagacacatcaaactgactcacgttggatttcggtgacaacaggatgcagcggagagtatccatatggttctggaataaatctagggcccattctaaatcatcaagtcgctgactgtataattatattcaacactaaagaaattcatccaggtgtcatccaatacactccgaagttcatcggtgatagagaagaccttcgtaaggttgtaagaaaaagcaactacagcggatggtatctttccatttaaaaaatttcacaaaatggtttacataccacaaggaccgtggtactatacaactatcaactgatacggatttggagaataaaatgaaatttaaattttattacgctaaacataaaataactgatgagtttgtgtcagttgaatattctagcgatgatgaaggtatgatttatactcgcttgagactatcgcattgggagtctgatacgccttatttttcaactcccgaagaaattacacgcttagttaatggtcatatgaatgaccactggaatgtaattctttcagatagtcttaaagcggctattaatagtaatgaaatgaaaatcgctgagattgagctatgagttcactatggtggtgttttgtttggttaattagtattccattaatttgtttaacatttacttttgtgatgaggttattatgaaaatttttaattctgtacttattgcttgtgcgtggtgggttgcacaggtttcagcggtagtagttggtattcacatttattacgaatatttttaaaaaagttgtttacaaagactgttcttccgtggtactattaccctatcaactacggaggaacagaaaatgaaaaagattgttaaagctatatggaatgtagttataatactaatagttttgagtatattcccaatcgttttaatgattgatgtattaaacgtttactttggatttatgtgaggaaaatatgaagcgtaaacgcggtgcttttacatttattgaatggtttttcgataatatttttccggctttattcatttttatgctgattttcgccttaggttcagttgtagttggaatctatttgatgacagtagtcggaattgatattcatcaaaatggtttaaaatctgtggttgaaacaatttggaatggtgtaaaataatgaatttgctgagcggttggttttatattcttatgttttacattggtgcaaattttccatattggatgggatggtcaacaactgcatttggattttatactccttgaggtgaattatgaaaagttttaaagatgtaaaagttggtgaaattttctgtttagataacggtgatcagttaattcgtatttcacctcttaagagcactagcgagaaaccgacagttaacgctactttagcaaataacagtaatgaacgtttctgtattgaaaatgatactgaaacttataccgtagaagagttttgggaattgagcgtcgactgcgacgattaatttaatggccgcgtattcatgcggccttggagtagaaaataatttagaggaaattaatatgaaatatatgactgttactgatctaaataatgcaggcgctactgttattggtacaatcaagggcggtgagtggtttttgggaactccgcataaagacattttgtctaaacctggattttactttttagtgagtaaattagatggtcgtccatttagtaatccgtgcgtgtccgcacgattttatgtaggtaatcagcgttctaagcaagggttcagtgcagttctaagtcatattcgtcaacgtcggtctcagcttgcgcgtactattgcaaataacaatgttccatacacagtattttatttgcctgcttctaagatgaaacctctgacgacgggatttggaaaaggtcagttagctttagcgtttactcgtaatcatcattctgagtatcaaacacttgaagaaatgaaccgtatgttggctgataattttaaatttgttttgcaggcatattaatgagcaatttccataacgaacatgtgatgcagttctatcgtaacaatcttaaaactaaaggcgttttcggacgccagtgaggaaaatatgaatattgcgaaattattaggagttatttcatttatttgttggatagtagcatgtgttttaactatctgtatcgatgctagcagtgtgttttcacaagctttggcccagggtatgtgtgcatatttaacatttgtgttgctatctactaatgattaagaaaatcttgggctattcattagcccttgctactttattggtagcgctatattatggagtaatgttcggattaattcaagtcgtgcttttcatttctgatgttattatggcactacattcactagtatggtaaatttatgcaactgaataatcgcgatttaaaaagtatcattgataatgaagcactggcttatgctatgtacacggttgaaaatcgtgctatcccaaatatgattgatggatttaagccagttcaacgatttgttattgctcgagctcttgatttggcacgaggaaataaagataagtttcataaactcgcttctattgcaggtggtgtagcggaccttggatatcatcatggtgaaaactctgcacaagatgcgggggctttgatggctaacacttggaataataactttcctttgttagatggtcaaggaaactttggttctcgtaccgttcaaaaagcagcagcaagtcgttatatttttgctcgtgtaagtaaaaatttctataacgtatataaagatactgaatatgctccggtacatcaagataaagaacacattccgcctgctttctatttgcctattattcctactgttcttcttaatggcgtttccggtattgcaactggttatgcaacttacattcttcctcatagtgtttcttctgttaagaaagctgtattacaagctcttcaaggaaagaaagtaactaaaccgaaggtagaattcccagaatttcgtggtgaagtcgttgaaattgatggacaatatgaaattcgtggaacatataagtttacttcacgaactcaaatgaatatcactgagattccgtataagtatgatcgtgaaacttatgtgagtaaaatcttagacccgcttgaagataaaggcttcattacgtgggatgatgcttgtggtgagcacggttttggcttcaaagttaaattccgcaaagaatattctttgagcgataacgaagaagaacgccatgcaaaaattatgaaagactttgggttgattgagcgtcgttcccagaatattaccgtcattaatgagaaaggaaagctacaagtttacgataacgtagttgatttaattaaagatttcgttgaagttcgtaaaacttatgtccaaaaacgaattgataacaaaattaaagaaactgagtcagcttttcgtttagcctttgccaaggcacatttcattaagaaagtaatttcaggtgaaattgttgtacagggtaaaactcgtaaagaactgaccgaagaactttcgaaaatcgatatgtattcttcttatgttgataaattagttggaatgaatatttttcatatgacttccgacgaagcaaagaaacttgctgaagaagctaaagctaaaaaagaagaaaacgaatattggaaaactactgatgtagttactgaatacaccaaagatttagaggaaatcaaatgagtccattcattggtattacaagcgctgcattagtatctggtagcattttactggcgggtttaggcgttgttccagccgtagcaggaggtcttcttgcgttcggaattcaacgtgttatcatgacagttatcacagtcatgcagtaattttagggagagcctcggctctcccttttttattttaaaatttttttcacaaaacggtttacaaccaaagcatactgtggtactatacaactatcaactactgatacagaattacggagattagaaaatgtctaaagtaacttacatcatcaaagcttctaacgatgttctgaatgaaaaaactgctgcgattttaattactattgctaagaaagatttcattacagctgcagaagttcgtgaggtgcatccatatttaggtaacgcagtagttaatagtaatattggggtattgattaaaaaaggcctggtggagaaatctggtgatggattaatcattacaggtgaagctcaggatattatttcaaatgcagcaactttatacgcacaggaaaatgctccggaactgctgaaaaaacgagcaactcgtaaagctcgtgagattacttccgatatggaagaagataaagacctcatgttaaaacttttagatgaaaatggatttgttcttaaaaaggttgaaacttaccgcagtaactatctcgctattttagaaaaacgtactcacggaattcgtaattttgaaattaacaacaatggaaatatgcgaatttttggatacaaaatgatggaacatcatattcagaaatttgctgatatcggaatgtcatgtaaaatcgctaaaaacggtaatgtgtatcttgacattaaacgctcggcagaaaacattgaagctgtaatcactgtagcatctgaactgtgaggaataaataatgaacaagttagaaattgttaatgaacttcgtcgttgcgcagaacctactcaagagggttgggatatttggtaccatggagcttatcttggaactatcgtaaagattaagactggtaaatacatgattattcgtgaaagtaaagatgctccagtaggtattcgcaataattttatggcagcgataagttcatttacggatgcagcttacgaaatttaccttgccgattataaagaattccaggaatctcaaccagttattcgttcaattggtgtcaacaaagctcagcagaaaactttgtggcagcgtattaaaggatggtttaaatgaacccatttattaatcgtttaaaaatgctgaatgtgcctttatctcgtgagactccggagagtcttgttcaaaaatttaaagcgcatggttataaatgcacagaagaagatattctgaaagaagttcctgaaatctgttggcagactgcatactgggatgaaaatcaaaagtatcaacgacgaattgtctgtgcagctaatcgttttaaattaaaagatggacgaactcttattattccaggtgctcgtcattattctaaagatatggcagaagttttagatgtagttaaacctcagttagttactcaacaagtttgtgatgatgaccaagggtttattgaccaatatagtaattattggacacgtgaagaagcaatgattattgcaacttatgctgggcaggtgcgtattgaacgtggtggtagtgaaaaagaactttactctgaggacctttactaatgaatattaaaaagtttcaaattgatggaattaagaatcaaatccaggcgttggaatatgccaataaaatgatgtcaactaattggggaatttatgctaatgagcctgcatttcagttttgtgatatggaattaactaaaaagcttgtaggaaaagattatgtatgtccatttagttccccgataaatggaatgctaaaacctgctttacgtgatctttatattgcgatgaacgaagagatgataaaagagctaaaacgtcaactgaaggtgattcaatttggccagggaaattaattcaaaatcagattattttaattctctcaacgataaagataaaaatctaatacggcactttatcgttgagatgggatataccgatacacgcgatttaagagaacatatatttgaatgtggtgtagctaaaaagttttcattcacatgcaaatgtttaagagaggtaattcagcactatgaacaatttagtcgcaaaacataattttaataaagcttctgttcataaagataagaagaaagcgtttaaagaatctaatcgcaaacagaaacataaggggaaggtctatgattattgattctcaatctgtggttcaatacacaatcaaaattgatattctagaaaagctatataagtttctaccaaacctataccattcaattgttaatgaattagttgaagaactgcatcttgagaataatgatttcttgattggaacttataaagacctctcaaaagcaggatatttttacgtaattccagctccaggaaaaagtattgatgatgtattaaaaattataatgatttatgtccatgattacgaaattgaagattatttcgaatgagtcataatcttgaaaaggtaatcgagcataatgtagctcaggaacgtgagtcgttcaaggaattcgtagaaaaaatttttgaagaaaataacacagaccagtttacaaatcaagcgtctgatgatattataacaaagtcaactaattgagtggtatagttaatgaataaaaatattgatacagttcgtgaaattattactgttgcgtctattttgattaaattttccagagaagatattgttgagaatcgtgctaattttattgcatttctgaatgagattggagtaacgcatgaaggtagaaagttaaatcagaattcattccgtaaaattgtttctgaattaacccaagaagataagaaaaccctcatcgacgaattcaacgagggttttgagggtgtatatcgatatctagagatgtatacaaacaaataattatttagcccttcctaatattctggccgcctgggcacatattgattcaaggcggtcattacttatatgatcatttctataccagtacattgttatcgttccagcatagatattatccaaattaaaatatggacaactgtacatgtagtttatttcgggagtaggctttttagttggtaaaaaagcaaattttgagttggaataataatgacgtccatttaaatgaactgtatattcatccatagttttatcaacaggatatcctccaagtgatttttcacttattgttgaaggtaattttccttcatatgctataatatcaacaaaatagtttaagtttttagggcggaaagaatacaccgcactaaagtctgcctcagatgatatgtgaactatctggagttgttccagggcgacagattcaaagcgtgcgtttctttccttttcaataatttcactgtatgtttcatactttgattgcttatagtactcaaagaaactatctcccctataccaaacaatcgccatcataaataaaagaattacgacagctactcgggaagcaagaaccttcccggtagcgttatctttgaacaagcgatctagaacacccaacagaatatcagagggcgaaaatgatattctaggtgctgccatagaccctccttttaaggatatttattcaaaattatacccttggaccatatattactccaacattttgccatgttggagctgatcctataacagcatatccggcagcgccaccagctccaacttttagaactttaccgccatcatgccaggcattttgtccatttgcgccagcatcaccaccctggccagagtgagcattaccataattataaccacctcctgggccatcataagaagctgcgccgccggaataacctccgcctcctcctgggccaaatggtcttcctccaccaccaccaatatcttgccaatttgcaccagagtgaggacgataagcgataccacctccacctccacctccaccacaaattactccaccgttattaattcttaatcgtccaccgatgtcattttgaatacaatgaccaccttgttgaccattaccatctccgccggaatgagtccatccaccttgtccacctctaccccacatatggacgccgccaccaatattcaactgaacatattcattaggtgtatctccgtacatgaagaataaaggaacgtctctagaatatgataccaaatttccggtaatattaaacactataggtgcactacctgcctcaaaacatctatctcggaaccattgaccattgaagttatggtctgctccaagtgtatgaataatttctcttgagcgacctgcaaattgactcatccagcaaggaacacccaatcttaattgaccagctgcttgactcatccagcgctgacccgtttcatttacggctgaacttccaatccagccaggaactccaactactgccataatttatactccaaagggggcatttcccccttgttgttagaatttaaaatatttactaattttgcgagcaattttagtaaagagaggcgttttcaattctttaatttcttcactcatttcctgaatagccttaattaaaagagcattcaccgcagagttagaaattgttaaaatctcttctgggttatcaagagatccgacattagaagtgctaacagcttccggtaaaatttcttgtaaatcctgcgcgataataccaatctcatgtgcgatgacttctcggtcagaaagagacttaactttatcgtaggttttaacttttagtttatttaccttatctaccgcattttcttcgtagtcttcaacgttaattttcagacgacggtcggaacgaatataaacatcgttacagtaaaccgacgcactagatgtgaaatcaccatttgcagcccatgaataccagccgcctttgttcatatgcatcattacggtagcattaccaccgccagcatgaacacccattgccgcaagataatcagcaccccaatgaactgctttccaaattgaatatgcttgggtttgtgaattctgacaatctaagagaataccagcaggacggttgcgccagtcatcccaagcaccaccaaaaacatcaccacggataagagcgtattcactattataaggaacttgctctcccgctttaatcattgcaccctggaagtgatgactaaatgaacccccatgattattgcgaatatgtaaaataccctcatctgtagcccagataacagccttttctgcatcgctatcatctttaaaccagatgtggcgagcaccagttgagtttttgatggttattccgctaggtccatgcacggtcaaagaaccagcaacatcaaacatcaaactgttatctgtcctgcgttcagcatagaagtgataaccttttgaatcgccgacttccaatactgccgcgcgaccaacttctgaatttccccaattgttgatagagaatcgttcagagctattattcatctgatttaggtataatgtaccatcagtgaatgtttcgccaaagaaacgagttttaattgcacctgtcgctaaagtacgttcagtggaaaaatgggcgccttgactatcttctaactggatgatgttatcacgagcgttattgctatcaccccaatggttaaatttaaaataatctcgtgatcctaaacgtccggcgtcaaaagtcatcaagcctttcatgttaatatcaccgccgaccagaacgttatccgggaagttaactgtaccatcagcattaaatcttgatgtatggccctgtgttccatcttctttgatatggtgtatcacgaatgtacctgaattaatttcagtacctaaagaccaaactgctttaccttgaaggtatttttgcttaacaatcggataatatttgcttatagcagcatcatcatcgatttcctggaaaataggagccgcttgaacatattgaatatcataaccaccagcgccagcgccatgaccagtaaatttaatatagccgtttgctgcgaacgtattgtaacttgattgtaaatctggaatagtaactttaccagtatctaaagccatactaaacgggcgaagtggaccgatatcgccatgtttaccttcaccgtaagcagttggaataatatgaagactgctttctgaacgtctaaaaatagctccataatctgcgttccaaatgcgaagaccatttacagcatttgtcgcgatttcaccggctgcgctgattgtaccgtcaaatgtagcattttttactactgtaaagttttcattaacaatctgggtgccatttataaccgattcgattttacccgcagttgttcgttgaatataatgcatccatccaatatcatcagaaatttccatgacatttttacgggtgccttcacttggattagtaaaagtatttccccaaacagctatatacatgttatcaacggagctttgacccatggtatagcctttaaacattaaagttgaattattatttctaccatcaatattaaccgaaccaccaataacgtcaatattgcctggagtaactaacaaaccgccatgagtattaatgtttgtggtacccttaccgcggaaatagtgatgatagttaccgccttgataatatcctaaaagagtttgaccgtcaccagacgcgttattatcatggtaagtaacaacagtggctaatgcatagttttctgtcggtggcgttgtcataagaatcccatccggagaataacccataaccatttttctaaggctttgtgtttccgcaggaccgtaaatgaaagttcttgttccgttgtttactgcatgaaaatatccgtcctgatgccatttaaatccggtatcattatcgccaatagcaatagaacctttacctaaggctgaatatgtcataggacttgattccatacctactgcaattgaatggcctgcttgaagcccaccgaaataagaaaatgacaacatgtaatcagtaggggttgaaccagaataccaactgatgccgctattttcacaaatttcatggagcattgcggccgctgggtcggtacgtacaatgcgcaaatagtttttatctgtgtcagaattattatttgctaatgaagatatatcataatcgcccgtcttcttcccatctgtaataactttatcggtcagaatttgtggagacgaaatagatttccatgctgatacttcaggtgaagtaaataggccactgcctgaaaatgcataggtgctttcatcaccagcggcgtagtcttgaaccctgatattaagtacttgtgtagttaatccatcattagccggggcataaattattccgcgttcgcggttattgccatcgaaaaaacgaacatgcgctgtacctgaactttttgtaataagttctccgccctcagtcataatctgcccggcggcaataatatcgcgagttactcgagcaataccagttaaattaaaattacctgtctgagtgaaagcgccatttaaagtataatcaccagtttgattatagtttcctatatgaataacattcccgtcaatgctaccgcccttagcaaaaccaagatcaatgatatttccttggtcgtctttagtaaaaagtacgcggtcttttaagtttatagccaattcaccttcggctaatactgaagcggcaggacgtgctcctgcagttttgcttcttttaaattgtatttgttttaaagtagccataagtcctcttaataatagccgaaatcttgaacagaatccttaataacaatttgatcaaatcgtggaacatgtgaaggttgagatgcaggattctgcgaaaaaaggtttggcgcagttaaatttcctgtcatagtatctccagagcgtaataccctagagtttgcgtttgctgtaacaatatttattgctccatcaacataatctttccgtgtaaggtcataattatttactggagataatgaagttgcgcgtatttgtgatgcttcaattacaccctttgagctaatatctccatttcgcgtgttaattactacagttctacccgctgaaccctgtgatgatttaaaaccaataccataccacgaaacaatatccatatttgtagtatcatatgtggcattatcaccaggaccagcaaaaataccgttgtcacctgaccctgcaccaggaacagtcattcctttattaaaaattactttatttaaatacgtaccaccgttagctttagaaacgaaatcgttatcagcagcttgtggcttattatattctgaatatattttaaatgatttatagagtacatcgtcaccggctggattcaatggaaaatttccttgatgccaaatgacagagcctccagttgttgaacctacttttaaatcagccattgtatgcccctttattttaatagtatttataaagaaaaagggaacccgaaggctccctcaatttatacttctctaaattcttgcccaaatactttaccagctttagacgatgcttgcgtaggaagtaccattatatccggaggtgaagcagattcacagatataattaacacgaatgccgttgataccaaattcagcaggtttcgaaatacttccatttcttgatacttcagaaaagcttaaatttcgcataccgccttgtcccgcttgagcagttctttgcgcgtatatcgtaaatcccacagcgttttctggaacaaccacataatcttcctttaattcccaagacccagcttgtccggtaaactcagcttgtgtcgaagaaatatatccatttgatgcattataaaaacggatagatatatttgtagttccaagcgcaagtaaatctgcatcggcatataactgagctttaagataaagaacatcgccaggaattaaattataatcagagagtttacttatagcagctgaagttggcaaacgcgcgatttcgttattagttccaccaacggctgacataaattgctcaacactttcatacgttcttcttggaaacccggtagctcctacatcttctaaactgtcaaatacaacatctaaaatagtttgataatcatctgtgctttttctattacttaatttaacatgctctaatgcgatagctcttttagaagaagtataaaaagcagcatatgatacgtcgaatcttgacaatatagaatcagatggaaaagcagacgttcctgcggctcttagccaagatactacttcaggaggaaaattaacctttccgctagttaatatagcaacaagtctattattcgtcaaagagttcatgaaaccaacaaaagcagctgatgtagtatcatttgaagtcgaaaaagcatatgatttactatcaactaatgctccggtggaagggtcaaaaactcttaaatgaaggcctgcgctaaatgtttgatttcctacaggattatcctgaaatttaacgtatggtccttctgcagtagaaagcgggcaagaacccgctatacttattttatatcttactgaattgctttccgataaaaatggcgtttggacatatccttgtccaaactctgccataaatttttccataatacctcttattcaacccattcaaatttaaccgttttattcactgggtcaggaataatgcgaacattaccaattcgtaagaaatcacgaatagtaagattccccattatagcattatcagatggtaaagcgccaatatcagatggttgaggagggttacctccgtcaaatacctgaacaaaacttgaccaagagtttttagttttctgccatgtacgcgtccagcgagtggtgcgcgcttctggggtcgttggataagtaatccaatcttggtaaagcgaatcgagtgtgttaccaaattgagtcagcgtaccaggagatttaacctcttcaccgcgttctaagtatggaagcccagtcacttcattagttttttcaaccattttaaaataacccgggaactggttataagtggctgaatcattaatatcgattgaccagaatcctacagtatcagatgttggcgcacgggtatataaatcagaggttttagtaccctgagaacgaattctcgagttaacagttaaaccacctgaagttatagtagcacctttggcaatgattaagctttcaccaattgtaacctgcccagattgattattaatggacaatggacgtaatccattaaatccaccagtctgatcacccgatgcagtaagcataaaattcgttactgacccgtcattacgaataatgaaaccataatttccattaatagcacggaaagcatttgcgcttcgagaaataatttcaccagttgcagtgactgaattaccaaatgtagcaacgccattcgcattcaatgttcctgaagcattaacatttatcggtgttactgtaccgttgatattaaatgttatatttccagctttattacgctgagaataaaaatgactagacgtttcatcactaacttcaaatacggtagaacgtgttgtgtctgattccccactaaattgatttccccacactctgactgtcatcgtttgagccgggtttgttccagtttgaggtcctttctcaaaaatcagacgagttgccgttccagtattagaaatagttaatgtactatttgctgaaactgatccaccgaatgtagcagtactagatgatacaagaggggcactcagattcgtttgttgggttaaggttagtgaaccattaactgtttgtgcaatgtccctacgaatgaactgagatgaatctagaccatccaataaattactatcagcagcttttgcttttaacggtaaataatttgctaatacacggtttaattcgtatggtgatactgcatagctatttttctcatacagttctaaatcttgagtagaaccggctgtatcattaccaacgaatgtaattgaaccagatgaagttttaacaaagcctcttactgcagtagtagctgcccaagtaggttcactctgcacaatccattttaaattttttggagatacagcagtatttgctgacgttccagtcacagtttcagactgagttgcaactttaataacaccttcttgtgcttcagtagatttagtacctaaaagctttttaggagttattaaaacattatctaatgttcctgcagcagcttcgacctgtgtagctacacgaagtgtaccacgctgtgtctcatttgcttcaagaatattaagggtataatggtcccagagagttcctgattcaactaatccagatagagcaacaacagaagtacgatcagtactattaaatctggttttaatttttaatggtgtagagatacgagtatcgtcgacgcctgcgtcgaattcaacttgtgtcgcaatttcagctataccacttaaactttcagttgctctacggtcatttaaagttttaggagtgactgcacgagtataatcagttcctgtattaacttcactttgcgtagcaatttcaattaaaccaattcttccatcagttgatgtctttttatgtaacgtttctggtgttacaaccgcatttgcccatccttcttgactctgtccagcaattacttcactttcaactgctaaaattactgcaccttgttgggttggagtagctttatactgatccaaagctttaggcgaaacaactaaattattagtgtttttattataaacgtttgtaccatttaattcacggctagaagctggagtagcacctgcagtagatacaaaagttacaataccagataatgattcagaaccttgtcgagcttgaagctttttaggagtgatgattgtagtatcatcagtacctgcgttagtttcttgctgcgtcgcaatttcagcaacgcctctacgagtttctgtggcagttctttcattcagctttttaggagtgacgataatatcatcagcaaaagagaatgtagtatcctggttcacttgggcagtagttgctattcttgcgatacctctacgagtttctgtagcagtacgattagctaacgtttctggagtaattgccaattctttttgtggagaattttctaaatctgcattagcttgagcctgtgtagctaatgcaattacacctaatcttgctctagtagaattatttaaagagtctactctttcaactgttggaacgttttgttgtacaacccagtattttccgtcagaatcttctatgtaagcaagctgtaaaactggaacataattagtttcgccgttaaaaactaattcttgaacagtcacccatttagtttcaggtggatattctgaacgttttggaaattgcaacaattgaactgaagaagcaattttatcttcaccggcagctttgattttaactgtttgtccttttctcatgtaattcatggaaatcttaacagtatcaccgatagaaatatcagttggaagctgaagttcaatcgtttgagttgttccattattcgcgccaaataccatgacttcttcatttggacggatgtttgaattagttgttataatgcgtaaacgtgctttactatccccgtcaaataatctccacaatttctcattatcatcaaacattaagaaaccatcaatagatgtacggccttcaatggaatgagttccaacttcttgtactgaagtcgtttcatcgtatgtagtaacgatagtatgatataacggatttaatttatctaaatcaacaaaattaataatatccccatgattagcaaatctaggaagtttaatattaattgctgaagcagaagtaaatctacgcacgataaaatcgtttgattgcgcttgataaagactcgctggcgttacaactgccgcttctctgctataatcagcaacatacatttgccacagacgattactaaaaattaaaactatctgtgattttggatgagtcattagtactgagcgtacttgttgacctctaaagtttacaatgctttgtaccggagctgtaattaaaacttgattaactccaggttttcctccaatatcttggagaactatagtatcaccgtcaattggggtagatggtaaagtaaatgtaatgtcattacccgctgcggtgttaactgaaatcgattcgcctgattttaattgataaggtcctgacgaaacagttgtccagtttgcatcagtacgtaacgctctccatcgtacgctattaaaagctcctgctggttttggaatatcatttatagcagcccaaaagcggttatcataaatgattacaaaatcttttaaatatccacgagttggatcatattgttgaactgtgttttcttgaattaagtaatcaacgtttacaccgtcagttcctacggcacgatcagctaaagctacgttgattattttatcaccacctgcgtccagaccatcttctgctctgaactttcttttaatctcggccattctcccgggctcctattgtgttttcaataataagtatttatacttgtttactttaagatttggatggtatataatagaaatctcactaattgaacgaggttcatatggatttagaaatgatgctggatgaagattacaaagaaggaatttgctttattgactttagtcaaattgcgctttcaactgctttggtaaactttccagataaagaaaaaattaatttatcaatggttcgtcatttgatattgaactcaattaagtttaatgtcaaaaaagcaaaaactcttggatacactaaaattgtactgtgtattgataatgcgaaatctggatactggcgtcgtgattttgcttattactataagaaaaaccgtggaaaagcacgagaagaatctacttgggactgggaaggttattttgaatccagccataaagttatagatgaattgaaagcttatatgccatacattgttatggatattgataagtatgaagcagatgaccatattgctgttcttgttaaaaagttctctttagaaggacataagattttaatcatttcatcggatggtgactttactcaacttcacaaatacccaaatgttaagcaatggtcaccgatgcacaagaaatgggttaaaattaaaagcggttctgctgaaattgactgtatgactaaaatccttaaaggcgacaaaaaggataacgtcgcttcagttaaagtacgatctgacttttggtttaccagagttgaaggtgaacgaactccttcaatgaaaacatctattgttgaagctattgctaatgaccgtgagcaagctaaggtgcttctcaccgaatctgaatataatcgatacaaagaaaatttagttctaattgattttgattatattcctgataatattgcttcaaacattgtgaattactataattcatataaattaccaccgcgtggcaaaatttattcatattttgtaaaagcgggtctttctaaattaactaatagcattaatgaattttgaggtgaataatggctaaaaaagaaatggttgaatttgatgaagctatccatggcgaagacttagctaaatttattaaagaagcatctgaccataaactgaaaatttctggttataatgaattgattaaagatattcgaattcgtgctaaagatgaacttggcgttgatggtaagatgtttaatcgtctgttagctttgtatcataaagataaccgtgatgtgtttgaagctgaaaccgaagaggtagttgaactttatgacacagttttctctaaatgatattcgtccggtcgatgagaccggtctttcagaaaaagaactttcaattaagaaagaaaaggatgaaatagcaaaacttcttgaccgccaagaaaatggatttattattgaaaaaatggtagaagagtttggaatgagttatcttgaagctacaacagcattcttggaagaaaattctattcctgaaactcaatttgctaaatttattccttcgggtataattgaaaaaattcagtcagaagctattgacgaaaatcttttacgtccttctgttgttcgttgtgaaaaaactaatacattagattttctactatgattaaactccgcatgcctgctggtggtgaaagatatattgatggtaaatcagtttataaattatacttaatgataaaacaacatatgaatggaaagtatgatgtaattaagtataattggtgcatgcgggtgtctgatgccgcttatcaaaagcgaagggataagtattttttccagaagttatcagaaaaatataaattaaaggaacttgctttaatctttataagcaatcttgttgctaaccaggatgcttggattggtgacatctctgacgctgatgcacttgtgttttatcgtgaatatatcggtcgcttaaagcaaattaaatttaagtttgaagaagatattcgcaacatttattattttagtaaaaaagttgaagtttctgcttttaaagaaatctttgagtataatccaaaagttcaatcaagttatatttttaaactacttcaatcgaatataatttcgtttgagacgtttatcttgcttgattcgtttttaaatataattgataaacatgatgaacagactgataatttagtctggaataattattctataaagttaaaggcttatagaaaaattttaaatattgattcacagaaagctaaaagtgtttttattgaaactgtgaaatcttgtaagtattgatatgaatatagtatattggtttacatttgaagaccgtgtcaaaaataagactccaccatactactatatcggtagtaaattaaattgctcatttgagaacggaataatatatgactcttccggaaaggaatactggagctcatgtaaacaaaaaagatttttgaatgcgctaatgcttcaaaaaccgagcgttaaaataattcaaattgatgatgacttggatgttattgaagaagaacgaaaataccaacttgaagtaaatgccagagataatccagactattttaatctggtatatgctggtggtggatttggtgtgagtggtgaaactcatccagccaaagacccggaagttagagagcatatgagattggctaattatatgaaccgtgacgattttagaccttggaaaacatcacgagctaatatagagtcttggaaattatctcatattgcttatgagaattatgtgttattattatcctctaatctgtacggtaaaactcctggatggcgaagagttaaaggtaatataaatataactgatacaactgctaaatcgatggtaaagtatttcaactcaggttggatacctctcgaagacccagagtattgcaaattatgccagctatgaggtaaagtgtcatagcaccaactgttaattaaattaagttaaaaaggaaataaaatgtttaaacgtaaatctactgctgaacttgctgcacaaatggctaaactgaatggcaataaaggtttttcttctgaagataaaggcgagtggaaactgaaactcgataatgcgggtaacggtcaagcagtaattcgttttcttccgtctaaaaatgatgaacaagcaccattcgcaattcttgtaaatcacggtttcaagaaaaatggtaaatggtatattgaaacatgttcatctacccacggtgattacgattcttgtccagtatgtcagtacatcagtaaaaatgatttgtacaacactgacaataaagaatacggtcttgttaaacgtaaaacttcttactgggctaacattcttgtagtaaaagacccggctgctccagaaaatgaaggtaaagtatttaaataccgtttcggtaagaaaatctgggataaaatcaacgcaatgattgcagttgatgttgaaatgggtgaaactccggttgatgtaacttgtccgtgggaaggtgctaactttgtactgaaagttaaacaagtttctggttttagtaactacgacgaatctaaattcctgaatcaatctgcgattccaaacattgatgatgaatctttccagaaagaactgttcgaacaaatggttgacctttctgaaatgacttctaaagataaattcaaatcgtttgaagaactgagcactaagttcagtcaagttatgggaactgctgctatgggcggtgccgcagcaactgccgctaagaaagctgataaagttgctgatgatttggatgcattcaatgttgatgacttcaaaacaaaaactgaagatgattttatgagctcaagctctggcagttcatctggtgctgatgacacggacctggatgaccttttgaatgacctttaatagattatattactaattaattggggaccctagaggtccccttttttattttaaaattttttcacaaaacagtttacattcttgtcattccatggtactatacaactatcggcaatactgctgatgattaaaagaggaaaataatatggctaaagttgatattgacatcgttgattttgaatatattgaagaaattattcgtaatcgttatcctgaacttagtatcacaagtattcatgatgatcccaattattgcaatttttctattgtcattgaaggtcctcttgaagacctcacccgctttatggctaatgaatattgtgatggcatggattctgaagatgcagaattttatatgggactgattgaacaataattatcaaggggctattacagccccgttaaaatgaggaaaacacaatgtatactggtagaaagtatgaacttgttccaagacttattgatacatttattaattatagcccacgttctaattcatcaatagttaaagctattcgagataatggcggatggtttgaagttaaagaagtttctgtcgctaatggatataaagcagtaaaacacattgaatgcgcaaatggaaagcatttttacctcaaagatagacttttagaaatttgtgaagacgaatttcattgttttcgtgagtataaagaaccgacttctgaagaagatgaagtcgaagacaagatttctggcgtaacaaaaattcactgcattgtagacgaaaacaatgtagatgaaatcattgaacttttgcgaaaaactttcaaaaagtagtttacagtagggtagtagtgtgatactattaccctatcaactaaggagaataaaatgagattacaacgccagagcattaaagattcagaagttagaggtaaatggtattttaatatcataggtaaagattctgaacttgttgaaaaagctgaacatcttttacgtgacatgggatgggaagatgaatgcgatggatgccctctttatgaggatggagaaagcgcaggattctggatttaccactctgacgttgaacagtttaaagctgattggaaaattgtgaaaaagtctgtttaaggaaaataatatgatttttgtatttgaatttatgaatgatgaattcgattatgcaatttttaacgcattgtataatcctgatttaaatgaatttaatgaaatgttttctgatgctttgcgtatgtcagaagaatactgtggagaatgccaacgtgtttgtgtgacagtctttgaaaacaaagaaaagacatatgaagaattattctttgacgctaataaagccactgaatggtttattgaaaggggttttgcgtaatgattaaattggtattcgcttattctccaactaaaactgtcgaaggctttaatgaattagcattcggtttaggtgatggtttaccatggggacgagttaaaaaagacctccagaattttaaagctcgtactgaaggcacaattatgattatgggtgctaaaacgttccagtcattgcctacattacttccaggtcgtagtcatgtggtggtatgtgatattaaacgcggctatcctgaaactaaagatggtgatttggctcatttttatattacctgggatgagtatgttaccttagtagccggtggacgtatccaattatctagtcctaatacaacttttgaaacgtttatcgattccagcgaaaatcgcatcagtgtaattggcggacccgctctgttatatgctgcattaccttatgcagatgaagtagttgtttctcgcatcgttaaaaggcatcgtgttaattcaacggttcaattagatgcaagttttcttgataatataagcaagcgtgaaatggttgaaacccattggtataaaatagatgaagtaacaacccttacggaatcagtgtataaatgaaataacgcgtggcggaaaatatgaactttaattattatcctattctattagaaaaagacgcgaaacaaccaaaatggcagggtcctcagtttatcaaaggcgtctatcaattagtagttcccaaagacaagatttatagcagcagttattgcactgaatccgcttgcagtattttcggtaatagttctccgtattggaattttgatataaaactggatagaaatatcgatatttggttgaaagctatggatattggcaatattacgtttgatgagaataattatcatattattggtcgcttttccaaacgcggtaaagaattgtatttcacgcctgaaattgaaagaaaatttgatgctaaaccgtattgattatttagcttcataaaatgtattataatttatataaggtactaaatgaaacaataccaagatttaattaaagacatttttgaaaatggctatgaaaccgatgaccgaacaggcacaggaacaattgctttgttcggtactaaattacgctgggatttaactaaaggttttcctgcagtaacgactaagaagctcgcctggaaagcttgtattgctgagctaatatggtttttgtcaggaagtactaacgtaaatgatttacgattaattcagcatgattcattaattcaaggcaaaacagtctgggatgaaaattacgaaaatcaagcaaaagatttaggataccatagcggtgaacttggtccaatttatggaaaacaatggcgtgattttggcggtgtagaccaaattgtagaagttattgatcgtattaaaaaactgccaaatgatagacgtcaagttgtttcagcatggaatccagctgaacttaaatatatggcattaccgccttgtcatatgttctatcagtttaatgtgcgtaatggctatttggatttgcagtggtatcagcgatcagtagatgttttcttgggttaattgaggcctgagtataaggtgacttatacttgtaatctatctaaacggggaacctctctagtagacaatcccgtgctaaattgtaggactgccctttaataaatacttctatatttaaagaggtatttatgaaaagcggaatttatcagattaaaaatactttaaacaataaagtatatgtaggaagtgctaaagattttgaaaagagatggaagaggcattttaaagatttagaaaaaggatgccattcttctataaaacttcagaggtcttttaacaaacatggtaatgtgtttgaatgttctattttggaagaaattccatatgagaaagatttgattattgaacgagaaaatttttggattaaagagcttaattctaaaattaatggatacaatattgctgatgcaacgtttggtgatacatgttctacgcatccattaaaagaagaaattattaaaaaacgttctgaaactgttaaagctaagatgcttaaacttggacctgatggtcggaaagctctttacagtaaacccggaagtaaaaacgggcgttggaatccagaaacccataagttttgtaagtgcggtgttcgcatacaaacttctgcttatacttgtagtaaatgcagaaatcgttcaggtgaaaataattcattctttaatcataagcattcagacataactaaatctaaaatatcagaaaagatgaaaggtaaaaagcctagtaatattaaaaagatttcatgtgatggggttatttttgattgtgcagcagatgcagctagacattttaaaatttcgtctggattagttacttatcgtgtaaaatctgataaatggaattggttctacataaatgcctaacgactatccctttggggagtagggtcaagtgactcgaaacgatagacaacttgctttaacaagttggagatatagtctgatctgcatggtgacatgcagctggatataattccggggtaagattaacgaccttatctgaacataatgcttccatttaatattgcatcatatgctacgttagttcatattgtagctaagatgtgtaatcttattcctggagatttgatattttctggcggtaatactcatatctatatgaatcacgtagaacaatgtaaagaaattttacgtcgtgaacctaaagagctttgtgaactggtaataggcggattgccttataaattccgctatctttctactaaagaacaattggaatacattcttaaactcaggcctaaagatttcgttctcaaagattatcagtcccacggtgtcttgaaaggaaaaatggcggtataattttaatttaattgcgaggatatatgattttacgatttaaagatacttctggtgtcgttctttttacacttcctaatccaagcgagttagaagttccaggaccaaatcagcctattatcatttatggcaaaaaatattatacccataaaatgactcgtgagtattttgataataaaatttctacagttaaaacttcttcagattgttactatgatattactgttttaacggaaaaacaatatgacgaattatcaccgcgcgggccgtctatgccgggtagtgaataaatataaatccgactttgatgttaatattcaccgtggtacattttggggaaattacgtcggtaaagatgctggcagccgggaggctgccattgaattattcaaaaaagattttatacgtcgaattaaatccggagaaataactaaagcacatttagagcctttacgtggaatgaggctaggatgcacatgtaaaccaaagccgtgtcatggtgatataatagctcatatagttaaccgattgtttaaagacgattttcaagttgaggacttatgcaattaattaatgttatcaaaagtagtggtgtttctcagaactttgacccacaaaaaattattaaagttttatcttgggcagctgaaggaacatcagtagatccttatgaattatatgaaaatattaaatcttatctccgtgatggaatgacaactgatgatattcagactattgtcattaaggctgctgcgaattctatttcggttgaagagcctgattatcaatatgtagctgcacgttgtttaatgtttgctcttcgtaagcatgtttatgggcagtatgaaccacgttcatttattgaccatatttcttattgtgtaaatgaaggtaaatatgaccctgaattattgtcaaaatattcagcagaagaaattacatttttagaatcaaaaattaagcacgaacgggatatggaatttacttattccggggcgatgcaattaaaagaaaaatatctagttaaagataaaaccactggtcaaatttatgaaactccgcagtttgcatttatgactattggaatggcattgcatcaagatgaacctgttgatagactaaaacacgttatccgtttttatgaagcagtatccactcgacagatttcattgccaactcctattatggctggatgtcgtactccaactcggcaatttagttcatgtgttgttattgaggcaggagattcattgaagtctatcaataaggcttccgcttcaattgttgaatatatctctaaacgcgctggaattggtattaacgttggtatgattcgtgccgaaggttctaagattggcatgggtgaagtacgccatactggtgttattcctttttggaaacattttcagactgctgttaaatcatgctcacagggtggaattcgtggcggcgctgctactgcttattatcctatttggcatttggaagttgaaaatcttcttgttttgaaaaataacaaaggcgtagaagaaaaccgcattcgtcatatggattatggtgttcagctgaatgatttgatgatggaacgattcggaaagaacgactacattactttgttcagtccgcatgaaatgggtggcgagctttattattcttattttaaagaccaagaccgtttccgtgaattatacgaagcagcagaaaaagaccctaatattcgtaaaaagcgtattaaagcccgtgaactatttgaattgctcatgactgaacgctcaggaacagcaaggatttatgtacagttcattgataatacgaataactatactccgtttattcgtgaaaaggcacctattcgtcagagtaacttgtgctgtgaaattgctattccaacgaatgatgtgaatagtcctgatgctgaaattggattgtgtactctctctgcattcgtactggataattttgactggcaagaccaagataaaattaatgaattggcagaagtccaggttcgtgctcttgataatcttttggattaccaaggatatccagttcctgaagcagaaaaagctaaaaagcgtcgtaacctcggtgtaggtgttactaactatgcagcttggttggcaagtaactttgcttcttatgaagatgctaacgatttaacacatgaactatttgagagattacagtatggactcattaaagcatccattaaactcgccaaagaaaaaggaccttgcgaatattattcagacactcgttggtctcgaggcgaattacctatcgactggtacaataaaaagattgaccaaatcgcagctccaaaatacgtttgtgactggtcggcgctgcgggaagaccttaagctctttggcatccgtaatagcacattatcagcacttatgccatgtgagtcatcttcccaagtttctaacagtacaaacggtatcgagcctccacgtggaccagtctctgttaaagaatcaaaagagggctcctttaatcaagtcgtgcccaatattgagcataacatagacctatatgattatacgtggaaattagctaagaaaggtaataaaccttatcttacgcaggtagctattatgctgaaatgggtatgtcaatcagcttcagcaaatacatattatgacccgcagatttttccaaaaggaaaggttccaatgtcaataatgattgatgacatgctatacggatggtattatggcattaaaaacttctattatcataatactcgtgatgggtcaggtacagatgactatgaattagaaacacctaaagctgaagattgttctgcgtgtaaattgtaatgaattatcaaaaaatctataatgacctaatttcccgggcgaaggctcgggaacctttatccgaatataaagagactcatcatataattcctaaatgtttaggaggaaccaatgatgttgaaaaccttgtggatttaactggtcgtgaacactttttagctcatagattattaaccaaattcaattcttatcctggtcttaaacaagcctttggtatgatgtgtttgaccaataaagggagaaattataacgtttcttctaggctatacgaattaggcaagaaacttctatcagaggctatgactggacgtgaaatgtctgaggaaaccaaagctaaaatcagcgaagctttgaaaggacgacaatttacagatttacatatccaacggatgagaaagcctaaatctaaagaacactgtgaaaatatatcaaagtctaaacttggtgtgcttaatcctatgtatggtacaatatctccaacaagaggtgtaccacatacagataaaacaaaattgttaatatctgaaaagactaaatctggtactgaatatccgccatgtccacattgtggcaagaaagttaataagggtaatgctttaagatggcattatgataaatgtaaatttaaggattttaaatgagcacagtttttaacacccaacaagttgatgttttaaatgaaccgatgttttttggttctggtttaggcattgcacgttacgatatccaacgtcataaagtttttgaagaccttactgaaaaatctctctcatttttttggcgccccgaagaggtaaacttgatgttggactctgcgcagttcaataagcttcctcagttccaacaggacatctttacaaacaatcttaagtatcaatcattattagattctatccaaggcagggccccatctgcggtacttatggcactgatttccgacccttcattagatacatgggttgcaacatggacattcagtgaaactattcactctcgttcatatactcatattatgcgaaatctttataccgatccatctaaggtatttgatgaaattgtattagacgaagcaatcatgaaacgagctgaatcaataggtaaatattacgatgatgttctagtcaagactcgccattgggaaaatgctaaagaatttgtagaactagctaaagaatctcctgatgccgattttcgtttaaaccgagctattaagcaagaagccgaagctaaacgtgctttaatgaaatctctttacctctgtttgcacgttattaatgccttagaagctattcgtttttatgtatcttttgcgtaaaatgcgcctttaagcggtaacgtttatcgaaaactcctttaattgctggaaagtcctttataggaaaactagcagccaaggttttgcttgcacctttaattagtataatataaatatgattatacttttaagaggatgcacaattgaactatagaaaaatttggatagatgctaacggacctatacctaaagattctgatggaagaacatacgaaatccatcataaagacggtaaccgtgaaaataatgatttagataatttgatgtgcctttctatacaggaacattatgatatacatttagctcaaaaagattaccaggcttgtcatgctataaagcttagaatgaaatattctcctgaagaaatttctgaattagcttctaaagccgcaaaatctagagaaatccagatttttaatatccctgaagtacgagctaaaaatattgcctctattaaatctaagatagaaaatggtacatttcatcttttagatggtgaaatacagcgtaaatctaatttaaatagagttgcattaggtatacataattttcaacaagctgagcatattgcaaaagttaaagaacgcaatattgcagctataaaagaaggtactcatgtattttgcggtggtaaaatgcagtcagaaactcaatcaaaacgggtaaatgacggttcacatcatttcttatcagaagaccataagaaaagaacatcagcaaaaacattagaaattgttaagaacgggacccatcctgcacaaaaagaaatcacatgtgatttctgtggtcacattggtaaaggtcctggattttatctaaaacataatgacagatgtaaattaaatccaaatagaattcaattgaattgtccatattgtgataagaaagatttatcaccatcaacatataaacgatggcacggcgacaattgcaaagcaaggttcaacgactagtcttcggacgtagggtcaagcgactcgaaatggggagaatccctctgggattgtgatatagtctggtctgcatagtaatatgtagcagttcataagagaacgggttgagaattagcgagctcaatcgaacataacggtacctttaacttccataagaacatggaaatcatggaaggtaatgctaagattatgaagttcattgcgcgtgatgagcaacttcatcttaaaggcactcaatatattattcgtcaacttcaacttggcactgacggtgatgaatgggttaaaattgctcaagagtgtgaacaagaagcagttgatattttcatggaagttaaccgccaagaaaaagattgggcagttcatttatttaaagatggtgatgttcctggattaaatacaaatagcatgtggagctttattgattacttaactgtatctcgtatgaaacagtgtggtcttccatgcccaattaccgatgctccggttaaacacccatatccttggattcgtgaatatcttaattctgataatgttcaatccgcgccacaagaagtagaactgtcatcttaccttgtagcacagattgataatgatgttgatgataaagttatgatgagttttaaaaaatatttttaaggagtgggccgcaaggcccattttattatgaaagaaattgcaacagaatattcatttattaaatatactgagctagaattagacgacaacggaagtataaaacaattatctattccaaataagtataacgtaatttatgctattgctataaatgatgagcttgtttatattggaaaaactaaaaatttacgtaaaagaataaactattatagaactgctattaaccgtaaagacaaaacgtctgattctactaaatctgcattaattcatgctgcgctaaaggaaggaagcaaagttgaattttacgcccgccaatgttttaatctttctatgacaaatgagttaggtacaatgacaatcgcaacgattgacctagaggagccgctattcattaaactgtttaacccgccttggaatattcaacacaagaaaaaatgatgcttccacatggagtgtggtactatattcaaaacacaaaagaggatacacaatgcaagaactttttaacaatttaatggaactatgtaaggattcacagcgtaagtttttttactcggatgatgtaagtgcatctggaagaacttacagaattttctcatataattatgcatcttattctgattggttacttccagacgcattagaatgtcgtggaattatgtttgaaatggatggagaaaaaccggtaagaattgcttctcgtcctatggaaaagttttttaacttgaatgaaaatccattcacgatgaatatcgatttaaatgatgttgattacattctaacaaaagaagatgggtctttggtatcaacgtatttagacggtgatgaaattctgttcaaatcaaaaggttcaataaaatctgagcaggctttaatggctaatggaattttgatgaatattaatcatcaccagttgcgcgacagacttaaaaaattagccgaagatggatttactgctaactttgaatttgtcgctccaactaatagaattgttcttgcttatcaagagatgaaaatcattttattgaatattcgtgaaaacgaaaccggtgaatacatttcatacgatgatatttataaagatgctgctcttcgtccatatctagttgaacgattcgaagtcgatagccctaaatggatagaagaagctaaaaatgcagaaaacatcgaaggctatgttgctgtgatgaaagatggttctcattttaaaattaagtctgactggtatgtgtctcttcatagtacaaaaagttcattagataatccagaaaaactgtttaagactattattgatggtgcatcagatgatcttaaagcaatgtacgctgacgatgaatactcatatagaaaaattgaagcatttgaaacgacttatctgaagtacttagaccgagctctgtttttagttcttgactgtcacaataaacattgcggtaaagatagaaagacttatgcgatggaagcgcaaggtgttgctaaaggtgctggaatggatcacctgttcggtatcattatgagcctataccaggggtacgatagtcaagaaaaggtcatgtgtgaaatcgaacagaattttttgaaaaattataaaaaatttatcccagaaggatactaagctgtttacaagtccctcgtgttgtgttatagtagtcttattgacataacatgaggactttatgatggatttacagcttattactactgaaatggtcgttgaagcatacggtgatactacagatgggatttctgtattcaaaggaaatcgtcgagttggatatatcactgatcttaagaaagatttagctaagcaagtcaagcggaaaacgaccattaaagaatatcgaaatcgtcgtcttgagcaagcccgtgatatgcttcctgatgcggttgaagagatgaaagtctttttagaaaatcaactcgctaagtatgattgtgaagtgttcattaatcagactcaacctaatgttcatatcaatagctgtaaatgctatatcatcgttaatcctttgactggaaagcatcgtcttggaattagtaatccaaatcgcagtgcatcggatatggcagaagatgttgaggcatgctttaaaatttctaaatctccggctgaacatcatattttaattaacggtctttctcaagacgatattatagaggttattaaaactttatgcaattaagtaatacgacaacaggtttgctattaattgtaattgcattaggcggaacttctttaattttaaaaaataaaattgaaagattagaaacgtctgttgtagaaattacaaaaacggccaatgaaaacgccttagcattaaataatttgcgaattcagtataattatattgatgcgatgaataataaaaatcgtgaggcaattgctgctattgagcgtgaaaatgaaaaactgcgcaaagacgcaaagaaggcggatgtggtggctcataagccaggattggttgaaaaacaaatcaacaactccttcaacaagttcgcagaagacatccaggacctttctaaatgattaaactatcagcagtaatattatctattggtcttctagttggttgttcgacaaagcctctagaagtaaagaaagaaacagttcatcctaattggcctgtacaaataaagtcatatgatgaagctaaactatcttggcaagttaaagttatcgatggtaaagcttgggtcggtatgccatttgaagattcccaggaatttcgtatttggcttaatgatgtaaaacgatatgtacatgaccagaaaactatgatatgttattatcgtcaagagctaaaagaggataaatgtaaatgatttcatggcatcaatttgaacatctcaaaggattgatttatgaatccgagatggctgcaatgatttatggacgccagattcagcgattagaatctttacctccaactaatgatgttttattagctcaatcacgcgctaatctcaaaaatgaatatcaaaataagtggggtaaagcatctaaagacctgcatgattatattcaatcattggttgagaaaaataaatgaaaactctgttagaacgttatattgagtgctcggaccgttacattgatgcatgccgtgaaaatgtatcaagcattagcgaagacattgaatatgctaaagctttagatgacgctggtaaagctctacgaaaagaagcaaaagcccgtgggcttgatatgtatcagcttaaaaatcacatgataaaatttatttcatccaatgttcagagcaaatcggtgaatcaatcaacagctgaagcgtataaaggacggcgtgagcataatattcgtattcttgaagttttcttaggaattaaatgatgaaaaagattattttgactgttggatgtcctggttcaggtaagagcacttgggctcgtgaatttattgctaaaaatcctggattttataatatcaatcgtgatgattatcgtcaatccatcatgggccatgaagaacgtgacgagtataagtataccaaaaagaaagaaggtatcgtaactggtatgcagtttgataccgcgaagagtattttgtatggcggtgattctgtcaagggagtaattatttcagacactaacttgaatcccgaacgtcgcctagcatgggaaacttttgctagagaatacggctggaaagttgaatataaagtgtttgatgttccttggactgagctagttaaacgtaactcaaaacgtggaactaaagcagtaccaattgatgttttacgctcaatgtataaaagcatgcgagagtatctcggtcttccggtatacaaagggactcctggtaaaccaaaagcagttatttttgatgttgatggcacactagccaaaatgaatggtcgtggtccttatgaccttgaaaaatgtgatactgatgtcatcaacccaatggtagttgaactgtcgaagatgtatgccaatatgggttatcagattgtcgtagtaagtggtcgtgaatgtggtactaaagaagatccaacgaaatattatcgtatgacccgtaaatgggttgaggatattgctggcgttccattagttatgcaatgtcaacgcgaacaaggtgatacccgtaaagatgatgtagttaaagaagaaattttctggaaccacatcgcaccacattttgatgtgaaattagctattgatgaccgaactcaagtagttgaaatgtggcgccgcatcggtgttgaatgctggcaagttgactcgggagatttttaatggcgtggcatcatgaaacttgggatattattaattggcttgaagaaaattatgtgaggtaaatatgtttccgacttattctaaaatcgtagaagtagtgtttagtcaaattatcgctaataatatgtttgaaaagcttgataacgcagccgaacttcgaatccacgctcaagtgactcatgtattgaacactttgcttccagaccaggtggattctgttgccattacgctgtatccaggttccgcgcatatcattgtcgtattcggtcttgatgctgagttagttatcaaaggcgacattcgctttgaatctcaaactgcggaattcaaagcgatttaatagtttactttacggtagagttgtgatattatagctttaccaaaacaaatgaggaaattgaaatgctaagtgaaaaaccaattactgttaaagaattccaagaaaaagttaaactatttgctcaggaattggtaaataaagtttctgaacgatttcctgaaacatcggttcgtgttattaccgaaactcctcgttcagtattagtaattgtgaatccaagtgatggtgaccaaataacacatctcaaactggattttgatggattagttgaagcacaaagggtgtatggcgtactatgatgaatttaactgatataattgataattgtcttgaaaatgatactggcgatcatagagcgcttgattctgaaacagcacagttcattagaataactttaatgaatgatactctagtgaatagtattcatccttctgtgtatgatgctattattgtgacgaagtatccagttgagcttcacaaaaagatggctggtgcaatttttattgataagaaaaaccgctttaaagatgggcagaatataattagttctgttattaaaagtataactaaacttcgtcacgaaatttatcgtgttgaaactgctaaatctgcttatctggtgattatgaaatgaaagcgagtacagtacttcaaattgcatatttagtatcacaagaatccaaatgttgctcctggaaggtaggagcagtaattgaaaagaatggacgtattatttctaccggatataacggttctccagcaggtggtgtgaattgctgtgattatgctgctgaacaaggctggttgctgaataagcctaaacatactatcattcaaggtcataagcctgaatgtgtatcgtttggttcaactgatcgctttgtcttggcgaaagaacaccgtagcgctcactctgaatggtcgtctaaaaatgaaattcatgctgaactaaatgcgattttgtttgctgcacgaaacggttcttcaattgaaggtgctactatgtatgtaacactttctccttgcccagattgtgcaaaagcgatagctcaatctggaattaaaaagctggtttattgcgaaacatacgataagaataaacctggctgggatgatattctgcgaaatgcaggtattgaagtgtttaatgttcctaagaaaaacttgaataagttaaattgggaaaatatcaacgaattctgtggtgaataatgaaatttcgtttggtacagctcacagcaattagttcttattctaacgagaatatttcatttgctgtagagtataagaagtattttttctctaaatggaagcagtattataagtcaaactgggtttgtattgataaaccgtatagttggaaatctgatctagaaaaatgccaaaaattgctttccactcttaaagaacgtggaacaactcatattaaaactgtgataggtaaataaatgaaactgacaactgaacagaaagtagcaattcgtgaaattttgaaaactaaattgtccatgggtatttcaaacgtggtttttgaaaagtctgatggtactattcgtactatgaaaggcactcgtgatgctgactttatgccaaccatgcaaactggtaaattgactgaatctactcggaaagaatctactgatatgattccggtatttgatgttgagctcggtgcatggcgaggtttttctattgacaaattgatttccgttaatggcatgaaagttgagcatttgcttcaatttattggtaaataaatgctttaagaattatttgttattattaattcatctgttaacaaaaaggaaaaacgatgtctgaagtacaacagctaccaattcgtgctgtcggtgaatatgttattttagtttctgaacctgcacaagccggtgatgaagaagttacagaatcaggacttattatcggtaaacgtgtccaaggtgaagttcctgaactgtgtgtagttcactctgttggtcctgatgttcctgaaggtttctgcgaagttggtgatttgacttctcttccagttggtcaaattcgaaacgttccgcatccttttgtagctctgggtcttaagcagccaaaagaaattaaacaaaaattcgttacttgtcactataaagctattccgtgtctttataagtgatataaataataatatgaattgggtgtcggaataataagttaaccgaacaattctacgtggtagtctacaactgagagatctgtcgaaagaagatgaaattcagaagaacgtgactaccgagttttaatctctaacgagaatttttaaatgattaaacaattacaacacgctcttgaactgcaacgaaacgcatggaataatggtcacgaaaactatggcgcatctattgatgttgaagccgaagctcttgaaatcctgcgttatttcaaacatctgaatcctgctcaaactgcattagctgctgagcttcaggaaaaagatgaacttaaatatgctaagcctctggcttctgccgcacgaaaagcagttcgtcactttgtggtaacactgaagtaatttattggagagtcactgccttagtgtgaagttaaaacgaggagccgtcgaactttgttttgcggtgtacctcttgaatgttgacgaggtttatggttatcctgtcggtaaatattcaaaacctaagtaccccttgagggctttcgcaggcaatgccaataagtcctgcattttcatttaaaagagaatttataatggcaaaacaagctaaagcaaagaaagcagttgaaaagaaagttggtgattctaaacgcgctggttacaagcgtgggtcgaactctcgtatcaatcaaactgttgagaagatcatgcgccgagcacgtgcggttcttcgagatgatgcttctcgttttggtaagcagaaagcataagttgaggactccttcgggagtcctttttattttccaaagattgcacaaagttgtttacagtatggctcctttgtgatagtattatcttacacaaacaaaggagaataaaatgaaaatcaatcttaactcatacatcaaaggtaaagatcacgacggctataaagctatcgaaactaaagaacttcagtggcatttatataaagaacaatttgaattcgtagattgtatgactcctgaaggtccttctgatgatttctcttggaaaataatgttaactaacttttttactggagatacatacgaattaaaaactttgattcttggtaaaattcgctgtgagacttatgaagataaagaaactggttactctgaagatgttacgtggtatcaaaatggtcgtattaccgctgacctcttgattgaaaaaatgaaagccaaaggtgaattaaatttagataattggattaaagttgcataaaatagtttactttggtacaggatatgatattatatacctgtaccgcaattaaacatctcggagaataaaaatgaactacatcaactttgaacgtaaatatgtttctaacggtattgcaggttctattgatactatctgcctttggaaacatcaaaatggatcagtatgcgaaattgagcagtatatgactcctaattacgtttatatgcgatttgaaaacggtatcacggtttcaatcacaatggaaggttccaactttaaaatcgctctggatgatgatttccgtcaacgcgatttagggactcatccttgctggaatggtgctaatcgcaagcttctggttaaaacttggattcgtcatattttgagtaacagagctaaacctgagcatcttgaagcaatctttgatgtagttcttaacgaatttgatatttaaaataaaatgaggggcttcggccccttactgaggaaaatactatgtttatgactacttattttgatacccgcaaaaatttctgtgaagtggttttctctaaggcacctaaagaccttcctgctcatttgcagcctactagtgaatcgattaaaaactatgttaatgtagtctgccctttagagttccgtactgtaaatggccgcgatactttagctatcactaaacttaatcgtgaaattgacattgacccttcaattgcgcgtgaaattaacatttctgatattggcggcggtaatgttaaatcgcatggttttcagatgaggttctaatgaaattctttttaggtcaaactgttgaattaaagggagttggtatacctggattaatttctaaggttctacctccatttaaatggagtggtattcaaataaaagaggcttatattgtttcctgggtagatggaaatgaagaccttcgtatgggtgatgaattatctcctatttacggattaaaggaattagtatgaatataattaataagatttttggaattcagtacattaaggtcacatataaagtaacgtataaaggtccgtataccgatgaatatgaagagccacaagttcagtctattatattagaaaaggatcctaactggccagttgaatttcgtcttccttgctatggtcattgggctgatgttgaaattataagtattgaaaatgtctgagctagagataagaagcaattttagatggccatcatgcgcattaagtaatttcgcccaatggcctttcgttatggatggtatccaatttggaggtctcgaaggattcctccaaggatgtaaggtgaaaaatgttgaacagcaacgtcgtatatttgggttatccgggcttgccgcccaacaagctggaaggtcttatgctagagctcaggaccgtgggaccctcttctggcttggagttccgttttcaagatactctccggcgtggaaagaattatacacaaatgcatattttgaagcagcgttccaaaacaagggctttcgcgatgcattacaagcctcgaaaggaaaagttttgaagcacagcatggctagtggtctaacaaaagatgatacaatactaaccgaagctgaatttattgatgtgttaaacctattaagagactctctatgaagcctactattttgactgatattgatggagtatgtttaagctggcaatcaggccttccttattttgctcagaaatataatcttccgttagaacatattttaaaaatgatccaagatgagaaatttatttctccgggtaaactctttaattgtgatgaagaacttggtgtcaagttaattgaaaaatataatcgttcagattttattcgttatttgtctccatataaagatgcactgtgtgtaattaacaaattaaaagaagattataattttgtagctgttacagcattaggtgattctattgacgctctgttgaatcgtcaatttaatttgaatgctctttttcctggtgccttctcagaagtaatgatgtgtggtcatgattcttcaaaagaagagttattcaaaaaggcaaaagagaaatataacgtaatttgttatattgacgatcttgctcaccattgcgatcatgcgaatgaaatattaaatgttcctgtttattggatggcgcgaggagagcgtgacaatattccaaaaactgctcagcgagtttatacatggaatgatgtagaaaataaacttttttcaccgaaggaaaataaagaaagttttgatagtgaaaaagctataaaagatgtaattgagaagatggttaaaaacgattcttttcgttggaacactacctggagaactcctggatttaatccgtataatccatattatacacatccatataatccatattatacacacccgtatcatatgaatccattccatacgtggagttatactaagcctggtgatgcagggtattttaatagatttactagtggtgataatattttccaaggagcattctaatgtttgtcgttcacactatttatgaaaatgaaggtaatactacacgtgattacggtcacgtaaatcaattctttagatgcaatccagaattccgagctcaaaaagacgaacgaatttttaaaaaatgtgtagagcaaggtttcatttatatcaagcactggatgcaaggaaataaagttagaactacatatcataggtctttaactgagcttaatgatgaattgatttataatagagctgtaaaccaaactctaaaggatgaacaatgattcttaaaattctgaacgaaatagcatctattggttcaactaagcagaagcaagcaattcttgaaaagaataaagataatgaattgcttaaacgagtatatcgtctgacttattctcgtgggttacagtattatatcaagaaatggcctaaacctggtattgctacccagagttttggaatgttgactcttaccgatatgcttgacttcattgaattcacgttagctactcggaaattgactggaaatgcggcaattgaggaattaattggatatatcaccgatggtaaaaaagatgatgttgaagttttgcgtcgagtgatgatgcgagaccttgaatgcggtgcttcagtatctattgcaaataaagtttggccaggtttaattcctgaacaacctcaaatgctggcaagttcttatgatgaaaaaggcattaataagaatatcaaatttccagcctttgcgcagttaaaagcagatggagctcgatgttttgctgaagttagaggtgatgaattagatgatgttcgtcttttatcacgagctggtaatgaatatctaggattagatcttcttaaggaagagttaatcaaaatgactgctgaagcccgccagattcatccagaaggtgtgttaattgatggcgaattggtataccatgagcaagttaaaaaggaaccagaaggcctagattttctttttgatgcttatcctgaaattagtaaagctaaagaattcgccgaagtagcggaatctcgtactacttctaatggaatcgccaataaatccttaaaaggaaccatttctgaaaaagaagctcaatgcatgaagtttcaggtttgggattatgtcccgttggtagaaatatacggtcttccggcgtttcgtttaaaatatgatgtacgtttttctaaactagaacaaatgacatcaggatatgataaagtaattttaattgaaaaccaggtagtaaataacctagatgaagctaaggtaatttataaaaagtatattgaccaaggtcttgaaggtattattctcaaaaataccgatggattgtgggaaaatgctcgttcaaaaaatctctataaatttaaagaagtaattgatgttgatttaaaaattgtaggaatttatcctcaccgtaaagaccctactaaagcaggtggatttattcttgaatcagagtgtggaaaaattaaagtaaatgctggttcaggcttaaaagataaagccggtgtaaaatcacacgaacttgaccgtactcgcattatggaaaaccaaaattattatattggaaaaattctagagtgcgaatgcaacggttggctaaaatctgatggccgcactgattacgttaaattatttcttccgattgcgattcgtttacgtgaagataaaactaaagctaatacattcgaggatgtatttggtgattttcatgaggtaactggtctatgaaagcttacttagaaacaattgtcattgctcaaaaagaaggtggagatgtttctacttctgtatcacaaattatgattgaatttatagatgcatatgcttataataaattcacagaaacatttgatgcttatgaaaaaggcccaaagtttgaaatatatcgtactctcttaccaatagattattaaaggccttcgggcctttaattttataaatagaataaacactagagaggatatgatggaactcattacagaattatttgacgaagatactactcttccgattacaaacttaaatccaaagaagaaaataccacaaattttttcagttcatgttgatgacgcaattgaacaacccggctttcgtttatgtacctatacatctggaggtgatactaaccgtgatttaaagatgggcgataaaatgatgcacatcgttccttttacattaactgctaaaggttcaattgctaaattaaaaggtctcggtccaagcccaattaattacatcaattcagtttttactgttgcgatgcaaacgatgcgtcagtataaaattgatgcctgcatgcttcgtattcttaagtctaaaactgctggtcaagctcgacaaattcaagttattgctgatagacttatccgtagtcgttcaggtggcagatacgtccttcttaaggaactctgggattatgataaaaagtatgcatatattcttatacatcgcaaaaatgtatcactagaagacattccaggggttccggaaattagtaccgagctctttactaaagttgaatcgaaggtcggcgatgtttatatcaataaagatactggtgctcaagtaactaaaaatgaggcaattgcagcatctattgcgcaagaaaatgataaacgctctgaccaagctgtaatcgttaaagttaaaatttcccgtagagcaattgcacaaagtcagtcattggaatcttctagatttgaaagtgaattattccagaagtatgaatctactgcagctaatttcaataaacctgctaccgctcctttaattcccgaagcagaagaaatgaaacttggaattaattcattagcttctaaaaccaaggcagcaaaaattattgccgaaggaactgcagatgaacttcactatgattataaattcttttcaaaaagtgaggttaatgaagtttctgaaaaaattaaagatgtaattcttaatgcgattaaaaatgaaccaactacttcaataaaatgtttagagaaatacgcagcagctgttaatcaattctttgaagaatataaagataattggcttgataaacataataaaaatcgtaaagggcagccggatgaagtctgggaagaaataactaaaaattcctggaacgcagcaaaaactaaattcctcaaacgaatgatttatagcttttctggaattggtgcaggtccaatgattgatattactattgcccgtgatggttctaaatatactccatcacaaaagcgcggcattagagagtattgtggatcaggatatactgacatcaataatcttcttttgggtcgttacaatccagaacgatatgatgtaatgagtgaaaaagaaattgaatctgcgataaataatttagattcagcctttgaaaatggtgaccgtataccagaaggcattacagtttatcgtgctcaaagcatgactgctcctatatacgaagcattagttaaaaataaagtattctatttcagaaattttgtatctacttctttaactcctatcatttttggacgttttggaattacacatgctggtattggtcttttagaaccagaagctcgtaatgaattgacagttgataaaaatgaagaaggaataactattaatccaaacgaaataagagcgtataaagaaaatcctgaatacgttaaagttcaaataggatgggcaattgatggagctcataaagttaatgttgtatatccaggaagtctcggaatagcaacagaagctgaagttattctaccacgcggattgatggtcaaagttaataaaataactgatgcttctaataatgatggaacaacatctaataatacaaaactcattcaagctgaagttatgactacggaagaactcaccgaatcagtcatttatgacggtgaccgtctaatggaaaccggcgaagtagttgcaatgacaggtgatattgaaatagaagacagagttgactttgcatcatttgtttcatcaaatgttaaacagaaagcagaatcatctctcggaattattgcgtcttgcatagatattacaaacatgccttacaagttcgttcaaggataaatcatggaacttattacagaattatttgacggcgcttcggcgccggttgttaacttaaatcctaagcataaaatacctcaaatttttgctattcaagccggtgaagaaagcgtgcttcctggatttagattttgtacatacacctctggcggtgatacgaataaaacgttaagccgggcgataaaatgatgcatatcgtaatgataggtgttaatgagaaactatcattagttaagcttaaaaacttgggtggaaatccaattggtgtcattaatgctgtttttgatactgctcttcaaacaatgaaacaatacaaaatcgacgcatgcctattacgcgtactaaaaagttcaaaatgtagtttacaagtccctcgtgttgtgttatagtaatcttactgacataacatgaggaacacaaaatgaaatcttctttacgctttttaggtcaagaacttgtagttgaaggcgttattcctgctgataacgcttttaatgaagcagtttatgatgaatttatcaaaatttttggaacagataaaaagttcggaatttttccttctgaaaatttttcaaagccacagcagactgaaagcattttccaaggtgtagtaacaggtaaatttgagtcagaagctccggtaaaaattgaagtttatattgaagacagtttagttgcttcagttgctgctttcatttcattccgtaaataaaaatgtggggaccgaaaggtccccattgttatattgctcctaatattttactctgcgaattgacaatccctgtcatagtattaatgtttgaaatgcttcctgcagttcctcctaatctactaagtcgtgaaagcgaattagatagtccagtaacacctccactatttccgagaacgctttgaataccatttatagcagcagattcaagccattcaagcgcagcttgtctatcaaccgctccagcctgcatgactctatacgcaaaagtaacatcaaatgtagttatttggttatctccatcatatgataactcaggagcgctcactgatattggaatgcatccagtgaacatcaccgcagtatgaggtaatccattacgagaatgaagattaacctgaatatctgcctcgacatcttgtggcaaagcacgtaatccagttactgggtcttgaacggagttaacccagtcttgcattgcacgatagttacaagcttctgaatccattctaaatgaaataaccaaagggtccaattctctcccagttatacgaatattaggagagttataattccagtcagtttcataggataatctattctctggcatttttacagagtatatcatcaatccagatgaattatatgccatattaaagaagtcaattaaatatgtaccaactgtaaatgagcccaataaactttgaactgtacgttgactcatggcaccaataagatatttactaacccctgattttcttatcagtttttgtgtgccagcagtaattagcgtggtaattccctgattaatatcgccttgagacaatcctaaccagtctgaatttagacccaagttattataagaaaagttgctaattgaacttatcaacgaagagcttttagttgatggagttgtcgcaaaaacgcagctaaacatattattacgttggaaatctgcgtttattgcttgattattaaattcctctaaagaatacattaaaaagtccccgcatataaagaagcacggtttaacgtgataatttctctcatagtaatctcaagagtaaatgtactagggaggtttggagcaatagctaatccgttaaagttaccattaggtgttttatcaaatctgatactctgtatttgacatggaccaaatatttccgtttttccatcaaacttagatgttgcaccaaagtttttcaccatccaaattgtcgggtttgaaactactagaacgttagttaaactcgatgtcattttctcaaatagtgttttatttttagctgcgtcttccggagataaaggttcaattaatgtagaacgataccaatcatctaaatacccttttatttcagcagcatattgagatttgcccgtttcaccataagaaaaatagttaaaatactgatagatattaataatagccattaaatcttctgttgaacgtggagtcaaatcccatgtaaacactttagttctattctcagcaccaccatacatacttctggctgtagtataaatctgttcattattatcagccattataccttgtgttatactttccagtgccccaaatactgcagttgaagcaatattacttagcacaccagtagcagttcctccgcctctactgataagactttcttgaacatcattaaatctatgtgatgatgtatcaacgtcagatttagatctcggtaaaagaatgtttgcgataggagctttacttattgttcctgaattattgtttgatattaatccatttgatagttttgatactgtactactaatagtgtttctagctgtacttaaaatactcgaagatgaagaagagtagttagatctcatcgatctaagacttccagaatccctagatgacatattgtatgcagtaaataataatccattcttatatagatctgttacctggaagtcccctgtagtgtcattaccactagcacgcccagttggaaactgggcagtgtatgttttagttgctacttctgatttagtactctgtccggctgaaattttctcaccggactttttaattaaatcagcagttatttctttaacaattgccatattattccttaattaactccggtcgcatcaaatacaccaggagcagtcgtgctcgttacgggtgtcatattatgaacgacagtatttttcttaataacattattagtattgttgattgaaggagatgcttgttgaacaggagcttgctgtgctttgttcttttctattacctggacttgttttgcttctggcgatttagcagaagtttcaggtttggcattaggctgatttttcttgagctcttgataagtagcatcaattttagaaaatctagcagcaagttcttttttaactgccggtgaattatttaaatccgggtcatccatccgttttttaaggtcttcataggcagcttcaactgatttaaccgttgagtctttactcatatcagctgaatcagcatatttttcaaaacgaatcatcgcggcacgggcttcattagccttcattaaagcattttttctttcttcaggtgaaagttgctttaatttttcttcttctgctgcgcgttcttcatcggttgtcaatgcttctttattatcaacgccacgaatccagttagatgcacgagttttccaattagcaattttatctaatccttttgctatcggaccaaggtctccgttcattcgtttatcttgataatttgcaactttttcctggtcttctttattgagagatgctccagtagaattttggaaattttctagtgctcttccttctacttcatcagcggtatccttcatgccaggaatgactcgaagaattgcagcagataatttagccattccaagctgaataagttctcctaaattataaagaacctttccaagcccttctacaatagctaccgtcaaaccgccccaatctccctcttcccaaagttgtttaattttatcaatagaatcaaagatgctctgtaataaagggctccatgttccggtttcgctagagaatttagtaaagtttgtactaaacaaatcccaagcctgtgaaaatttatctgaccaatatttgaaatgaaccatcagcaggtctattccgacaacaacagccaatatcattgcagtcattttagcagcttcaatagcagcactgatggtgtacttaaataacatgcttgatattttatcagtaattgaaatagatttcttaaatccgaaatcaacagtctttgttaatttatctaaagcttgagataattttaagttaaatgcatcttttttctgtttttcttctggcgattcttgtttaggttcaactggctgaggggtagggaaaaaatcagcatcaggatcattattaactgcttcaggagccggtaataaaggaccaacagattcagctgtatcgtcctcaacaactttaacaggaatagcgctttcaaccgtggctaaactagttccagtctgttgaattccagctgtctgaattttttgctctagtaaacttgttaatttatctaatttgctcccgagtgattcaccgatttctttattaatattgttgccaatttcaacagtttcagcaattaactcagaaccagcagtagtatcactcactgcgctttctacattgtcaattgctccaattatttcattcgatttttcttcaacagtttgagcaattaattcagaagcagcttgagcatcatccaatttcgtagatatatcgttaagtccagataaagtgttagaagcggatttagccgcttcctgtgttggtttattatctgaaataacttttctgcgcatcgtttgcatttcttgtggctttttcattcaaataatccaataatattgccaattccggttattggaccattagggccaggaattgctaaagttgtaaaaatgtcatttgcccattttaaaacgaatgctggcatctcaagaaaattaatttctttaacttcatcattgaccttaagtaagcacttggataacatatcgctcaccgttaaaaattgttcaaattttccaggaggtctaaaataaaatgtatttccttggtattgaaattccaatctttggcatacataaacatcattaatgtcataagtataaccatctatttctttgcgagatttaatctttccattaaattccaataaatgaatagaaacgaaatcaacttctgccggtgataaattcggacaaatagaatcgatcaaaagttttaaattttcatcaggacctttaacatcttttaaaatgttataatgtttaagacccattttaggaatagaaacttctttattgcttattggaagaactactttcttcagtggtagtatcagatttaaattcatttttaaccttaactgggtctattgtttccagtttcgttgcattagtgaacatatatagatgagttactgaattattattggataattcgtggataacttcatcaacgtaaaattctgttttaaattggtttttactatcattaaaaataattttaacgccaggtgtcaagttaaaattaccgacagtagaacatttagcgtaaccatcatactgcgccatagtctgaagacgaatagcttcttcatatccattcctataagtcatttcagaataagcacctgaccttgacactacaatagagttttctccctttcctgtagtaatcattggcaatgaagaatctaaaaatgaatgagcatagatagtagcgtttttcattgggtcgcgtttatgaggattcgatttagtcaaccaaacgaaatcatatgctaatggatattttaattcttggatgaattgacctattaaagatggctcaccgacaatcattggatacggttcttgatttatcatcatatcatagtccatcatgttaactcccatgatgtcttgccacacaaatacaaatttgtcacttcctacagctagagcaacttctctaacatacgacaaatagttttcaaatgtgctagtccatggaatatcaggaacataagcatttatagcatttattgctggagttaataacgtgcgatcctgataaatgacaccaagcatttcctttatagattcacctgcatcagagaaaaacggtctgccaaatttaagattttctatagaatgaatagttcccaattcaatagcaatgatgttatcaccttttgaatctactgacacggaaaaatgcttacatccataaattcgtgttttaacattattaatatcatttgcattagctacagaaatctgaattatttcatttccatccatttttgtatggatgtttttagaatcataaaactgcagcattccttcatttcggccataaagagaatcccgcatagttaatgtagtaatagtagcagctaattcaacaaatctattattactccaagcgtcgtagctatcaaataatttaacgctgagatttggatatccggggcgttgcaacatactcattattgtttatccttctcaatcagttttaatacgaatccgcgctcagcaggaatcattttcattattgaatttaagctataattactttttacgagtgtgtgattaatttgataaaaagtaaatatttcatctgggttaactaatagcttaaacacatctactatatcagtgtatttttttacatacttattacaacacgacatgtgcaatgttaaattaataggattcattgaatcgagaattttttctaatgtttctatctcgatggcatcaacaagttctatttgacttgattcactaatttccttccaatcataccacgtttcatctacttggacagaatgaatattttcagtaatcatctttgctttattttcataaaactcagaaggaaactttaatttaattttaacattagctacatcaaaaacaggttcctttaattctttttgatatatttcaaatggaactgtcttttcttttttacattttggacatacaaatgtgactggtactttagttttacctattgaccctacaaatacctgcaaaaatataaatggttgccaagtctttggataatctccaaaataatcagcaattaaatcagcaattacttctttttgttcttgtggtgaccgatgttctatatcgtttcgaactaacaaaaaatctcgataatcttctaccgtaaatggtttaaaacgatgaacaccatctggtaatttacaacgaataatgtttgccatagatgctccttttattctatttataaatatgataaataaaggagctaaaatatgtatgaatacaaatttgatgtgagaattggttctaaaataatcaattgtcgcgcattcacgcttaaagaatatctagaacttattactgccaaaaataatggttccgtagaagtaattgttaaaaagctaatcaaagactgcacaaatgcaaaagatttaaaccgccaagaatcagaactattgttgattcatttatgggcacattctctcggtgaagttaatcacgaaaactcctggaagtgcacctgtggaactgaaataccaacccatataaatctattacatacacaaatagatgcaccagaagacctctggtatatactgggtgacattaaaattaaattccgataccctaaaatttttgatgataaaaatatagcccacatgatagtatcatgtatagaaacgattcatgctaacggggaaagcattccagttgaagacttaaacgaaaaggaactggaagatttatattctatcatcacagagtcagatattgtagctataaaagatatgcttttaaagcctactgtttatttggctgttccaattaagtgtccagagtgtggaaaaacccatgctcacgtaataagaggcctcaaagagttctttgagttactataatgtcaaatattaataagctttattctgacattgacccggaaatgaaaatggattggaacaaagacgtttccagatcgcttggattaaggtcaattaaaaacagtcttttgggaattattacaacaagaaaaggttcaagaccgtttgaccctgaatttggatgtgatttatcagaccaactttttgaaaatatgactcctcttactgctgacacagttgagcgcaatatcgaaagcgcagtaagaaactacgagccacgtattgataaattagcagttaatgtgatacccgtttatgatgattatactctgatagtagaaatacgcttttcggtcatcgataaccccgatgatattgagcagataaaactgcaactggcttccagtaatagagtataatgcttcacgtataaacgtggtataatgaatctaagtccatccaataacaattgaatagagaacaatatgagattagaagatcttcaagaagaattgaagaaagatgtgtttatagattcgactaaattacagtatgaagcagctaataatgtgatgttatatagtaaatggctcaataagcattcaagtattaaaaaggaaatgcttagaattgatgcgcagaaaaaagttgctcttaaagctaaattagactactactcgggacgaggagatggtgatgaatttagtatggatcgttacgagaaatcagaaatgaaaacagttctatcagctgataaggatgttttaaaggttgatacttcattacaatattggggaattttattagatttctgtagcggagctcttgatgctattaaatcacgcggatttgctattaagcatattcaagacatgcgagcatttgaggctggaaaataatgaaatatagcattgatgatgcttttaattatgaagaagaattcgaaacggaaattcaattcttaatgaaaaagtataatctcaagcgtcaggatattcgtatcctggctgaccacccatgcggtgaagatgtactttatattaaaggaaaatttgccggatatcttgatgaatatttttattctaaagatatgggcattgatatgcatatgagagttatataaatagatatataatttagaggagacaatcatgtcagataagatttgtgttgtctgtaaaactccaatcgattctgcattggttgttgaaacagacaaaggtcctgtacatcctgggccttgctataattacattaaagaactaccagtttcagaaagttcggaagaacaattaaatgaaacacaacttttgctatagtgtgacctttagtctatagttttggcccttccttttttggttgggccttttttaatttaaaagctttcttctacttcatcgtctgaatcttctaattcagctctttttcctgccaaagcatctctcacggagatgtcatcagtatcttttaattcagtttctttaactcttttcttataataagcttcaagttcttctagaccttctaatgtttggcaagaggcaattttacccataaattcatcaatagaagcttcataaagaaattgtttaaattctagtaacatctttttctccaaagggccgaagcccttataaattaactgttttcattacgtaattaaatttttcatctgcgtagcgctgaatacgatcaatgccgtgttttaaaagatagttcaaatgaacatatttctttttcgtattagcagattttggcttaacaccgcaatcatctatgaggtcccagaccgttgcgattgttttagaaccatgcttacgtaatacgcgacctattgtttgcaatacaataattttagatttaacaccgtgtgctaaaacaacgtgatgcagatttttaactgaaataccagtagaaaatacaccataactagctactataattattcctttaccgttttcagctaaggttttcattacgttgcgtgtttcggtatcaacttcccctgatacgtaataaactttatcgtattcatttttaattaaatcgaaaatagctttaccgtgtgatacgtgtttaaacatgacaaaagcgttttcatctttttgcgcaagcttaatagctaatttagcgatccatttatttcttttactgagcccagtaataatttttatttcttcttggtaagtttttccctttaatttagtagtgaactcatcgggatagcgaagaaaaatactattaatttttaactcagttacttgtccatcttccattaatttagaagtcgttactggcttaaatatttcaccaaacattccaacatactgcatgatattagctttgccatcacgcaatgaaccggacaaaccaaatttaaacatgcagttatttaaacctgatatgatagatgaaatactttttcctgtagcaagatggcattcatcattcatcatcattccaaactgtgagaaccattctttcggttgtttaactacagtttgccatgtaccaacaacgactggtgcatcatttttatatttatcatcttttgatgctccgccaccaattttctttatcattgcatgactgaataaacgatagtcaacgaagtcatcagccatctgagttgttagagcagttgttggaacaatgataagaattttaccttcgtaattttccaaataataccgagcgagcagagcctgaattaaagatttaccagcggatgttggaagattaagaattctacgacgattaactaatccttcgaacactgcatctttttgataccagtgtggttcaattcttttatttcctgaatagatttctaatttagaaagccattcatcaaaatcttttcttgataattcttctttttcgttaatttgtgggtcaatccaggctttatagccaaagttatcacagaactttttaatttgcccgactaagccgaatggaagaagacgattataatctaaaagacggattcgtccatcccagttgccatatctgaagcgaggattaaacctatatccatcggcctcaaacgaaaagaaatctcttaattcgtggaacgtgctctcttcacaatcgatgcgtacatgactgaagtcgtgaaaatgtactttaatatccataattatgccttactaaatttgcctttagaatctcttttcatgagacgacctttaataaatccgtcgggaataataccgtctggttgtattaatttatttattgcaccattattgacccaaaaagttcctgtggtagtcggtttgactttacatccttttctggactttctattaggatgaaccatcccttttgcaaatccttctggaacaagttctccaggtttaataaaaatatttttagttccattagtgtaacaagttttacctaataccgtgcccggtgagttttcaaatcttttagcggaagattctttcatctttgttataacttctgtagtcataacaattccaccaattccaccaggtttcatattataataatttttgctttttattagttcaggagttataatttcttcttcatacatgtacgcttcttcggaagttttaaactcttttagtattgttctagagaaattgttttcaccatatttctttatagcctgctgaattgccttaccagaaccaaggtaaccatcattcaagtcatcagtagagtgttttcctatatactttttaccatttattagatttgttgtttcgtatacaaagtggtacatactattttccgagtaataaatatatctatatttatactgaggaaatattatgatagataaagattatattgcagagctgaaggctcttgatgataataaagaagctaaagctaaattagctgaatatgctgaacagtttggtataaaggtcaaaaagaataaatcttttgataatatcgttgctgatattgaagaagccctccagaagctcgctagtgaacctatgccagagactgatgggttatctattaaagacttaattgatgctgctgatgctgcagagggattaaaatatgacgatgaagaagttaatccagaagcagcacttctgattgattctccagttaaatctgatattaaaattgaagtggtagaaacggataaaattcctgaaaataccgatgttttgattgaagatactccttttgttgaagaaaaattcgaacaggctgtagctgagattattgaatctgaaaagccgtctgtatttactcttccggaaaactttagtccgaatcttcagctgattggaaaaaatccaggattctgcactgttccttggtggatttaccagtggattgctgaaactccggattggaaatctcacccaactagttttgaacatgcgtcggcacaccaaactttatttagcttaatttactacattaaccgtgacggatcagttctaattcgtgaaacacgtaattcttctttcgtaacattaaaataaggataacttatggcttttacagttgatataactcctaaaacacctactggagttatagatcagactcagcagtttactgctacacccagtggtcaaactggagatggacctattacatatgcttggagcgtagataatgttccacaagatggagctgaagcaacttttaattatgtattaaaaggacctgctggaacaaaaacaattaaagttgttgcaacaaatcaagttgccgatagtagtcccgaaacagcagaaattactacgactatcacggttaaaaataagacacaaacgaccaccttagcagtaactcctgatagccctgacgctggagtaatcggaaccccagttcaatttactgctgccttagcttctcaacctgatggagcatctgctacgtatcagtggtatgtagatgattctcctgtggacgaagcaactagcgctacattcaattacactcctaccacaagcggagttaaaaaaatcaagtgtgtagctcaagtaaccgcgacagattatgatgcactaagcgttacttctaatgaagtatcattaacggttaataagaagacaatgaatccacaggttacattgactcctccttctattaacgttcaacaagatgcttcggctacatttactgctaatgttactgatgctccagaagaagcgcaaattacttattcatggaagaaagattcttctcctgtagaagggtcaactaatgtatataccgttgatacctcatctgttggaagtcaaaccattgaagttactgctactgttactgctactgattatgatagcaaaactattacagcagaaggtcaagttcaagtgactgataaagttgctccggaaccagaaggtgaattgccttatgttcatcctcttccacaccgtacttcagcttatatctggtgcggttggtgggttatggatgaaatccaaaaaatgaccgaagaaggtaaagattggaaaactgacgacccagatagtaaatattacctgcatcgttacactcttcagaagatgattcaagattatccagaagttgatgttcaagaatcacgtaatggatacatcattcataaaactgctttagaaactggtatcatctatacttatccataatcttaggggcttcggcccctttcttcgtttttaaagcatacaaaacacatcttgagattgatgtatataatggcacaaaccaaataatacgggattgattatgagagctgaagttgaagtttatacattacatgaggcgggattttcattcgtagaaattgctcaaaaaatcggtttacaacctaaagaagttggattactatggactaaagccgagacagctcggtcaaagtttaaagcaaaagaaaaagttgtataccgtaaacgtctgattaataaaaaggtgaagaaatgagttttgcacaggaattaagagaaagggctctggccactaaagccaatttgttgagtgattttattactaacttctctgtgatggcagagaaagccgctgacaaaggccagacacaatttacatactacccgtcaaagaatgatttaactatcaccgagcaagtcgggcagtggttacgtgataatggctttcaatacaaaattaatcacgaccaacgtgatggacattggatagaaatcaagttctaatatgctttacattttttgatggtataatgaatctaggttctatccattcaaattaaacatcgggtcggagatagagtctctgctaattattttgatattattatttataatggtgatttatgtttaagaaatacagcagtcttgaaaaccactacaactctaagtttattgaaaaactctacactaacggtttgactactggtgtttgggtagcacgtgagaaaatccatgggaccaactttagtttaattattgaacgtgacaacgtcacatgcgccaagcgcacaggccctattcttccagcagaagatttttatggttatgaaatcgtactcaagaagtatgataaggctattaaaggtgttcaagaagtcatgggcagtatttcaacttcagtgccagtgacatatcaaatctttggtgaattcgctggtggtggaattcagaaaggtgttgactacggtgaaaaagatttctatgtattcgatatcatcataaacacagaaagcggtgatacttattacatgagtgattacgaaatgcaagatttctgtaatacgtttggttttaaaatggcgccaatgcttggacgtggaacatttgattctcttatcatgattccaaatgaccttgattccgttttagccgcttataatgctactgcgtcagaagaccttgtcgaagcaaataattgtgtatttgatgctaatgttattggcgataatacagcagaaggttatgttctgaagccttgtttccctaaatggctgccaaacggtactcgtgtagctattaagtgcaagaactctaaattcagtgaaaagaaaaagtctgataagcctattaaaactcaggttccattaaccgaaattgacaaaaatttgcttgatgttctagcttgttatgttacactaaatcgtgttaacaatgtgatttctaagattgggactgtaacgccaaaagattttggcaaagtgatgggattgactgttcaagatattctggaagaaacttctcgtgaaggtattgtattaacatcatctgataatccgaatcttgttaagaaagaattagtccgaatggtgcaagatgttctgcgtcctgcatggattgaattagtatcataacgaaaaagggacctttcggtccctttttattaatctacaataattttaggcaatttaacaccgagtaaaacagacaagtctgaacgtcctgccattttatccatgtccccgccatcaattactctcgcttctttttcatcttttgctactgtgtaaggatttgctgataaagcatatctaaccaataaacctatagacggttgtaagctttccggatcaactacaactttaaatgcaccgacatgttccgggtcgtctaaatccattccttcagtgtatggagcataaaagatggaccctacaatctctttttcgccgatattttctactacgccaacgattacataatctaatgggctgttagtatcgcaataaagcggtaaaccattagctaagaacccgtaggcattttgtgaaagatatttatcatcttctggtttatgttttaaccaacctgatgcagcaagaatcgcagcggcacgagctgaagcaacacagaacgttgctgtataagttgattctttttggatatgcgaaaccatttcacataccattcggtataatgaacgaccagcttcaggagcagatgcataactcaaatcaatgaatccagtatcagtaattcctgtaactttatagcgttttgatactgtaatcaaagattgcagaatatctttattgatttcatctgccatttcagttgcaagcaaatcttccaagaaattaggagcatcgaatccatttgcttctaaatcttgtgctaattcaactgtgatgccagttttaagtttgcgagatttaactgcggtttgccatttattaatctggaatctagcatccgcaatttcactatcagagctttcaaatttgcttgttgacgctgcgtcagaaaatagacgaacctttaaaagaacaattgcaatctgaagagctaattctaaatcgctttcttcaatggtagcaaatggtgtatcttctaatactttataaacgatattattatatttgaataaatcgcctttattgagagttaatttagactcttctgttaattctgtgatttgttctcggtctacatacccagcttcgccagcataagtagcaccagttttaaatgtaaattcattgtctgggttaaggtatttgataccataaaaagcagcaacaggttgattagttctttgcgttgctacaatgtcagaatatattaatttagtggtagcgcgagtcaaagcaacgagatttgggcgaccgattgagttgctattcgttgtggttgattcgcgcagaagttcgttgattttagccattgtattttccttgttgaaatataatactatttataaagctatttacaagaccaaagtaatatgatattatattcatatacaaacggagcgatgtttaaaatgaaatatttaatatatcaaattactaatatcatcaatggaaaaatttacatcggagctcatgctactcttgacgaaaacgatggttatatgggttctggcgtaaacatcaaaaaatccatcaaaaaatatggtattcataactttaaaaaagaaattctttattctttctcctcatctgaggagatgtataaaatggaagctttactagtcaatgaggaattcgttatgagaactgatacctataatgctgctattggtggcagaggaaatccagttatagttcatttgcaagatccttcatatcgtaatatgttatcaatacgaacaaaagaaggaatgactgtggaagctaaacgaaaaatatcaaaggcaaaaacaggcgttaagcaatctgatgaaactattgcgaagcgagttaaagggcgcaatgaatattataaaacacatgttcatccacgaaaaaataaacctatatcgatttcacatcgtaaagctatttctgaaaaacttggtggtattaaaaaatttattccaatatgtataaagggcgttaaatttgataatcctgattacgcagcggagcattttaaagttagtcctaaaactattcgcaattggataaatgcggatgatatgcctgattgctatcgtataaaatagaaaaagggaacccgaaggttccctaaaattgtgtttctatcgttagagattagatacctttaacatatacacgtctaaagtaagcgttcttaccaaggctgttcagaatagaaggcataccgctctggatgcgagaagccggagcctgagcagcggattctgcaaatgggttgataccgataccgtaacgagttttgaatcccattactggttggaagttcttcggatcggaaccacgcagcggagtcagagctacatatggagcatagtaaataccagcatccatttcgttcggacctttataacctacagtgaaataatcctgtttagcatactggtcgatatatacacggtatttaccacccagaacaccagcaaatactgacttggtagtatcagtgttaaagccagtagccagaccctgtgcagcataagaaatgccggtatcaactgaagccagaacgttaactacgttacgggaagcgataatgaagttaccttcaccacgaccggtctgacgagcaatttcaactgcttctttgtcaatctggaacaacagagctttaaaggattcacctgcccagcgagcaccacgaatatcgattgggtcctggaagtcaaatacaccagctttagaacccggagtcagggtcataccagatttaccaacctgagctgagtagttaatccaatcaacaacttcacggttgatttccagcataatttctgtagccagaatgccagacagttcagcatcagcatccataccgtgaacagcgcggaggtcctgtgctaattcgatagagtaagcagctttcagctgacgagatttagcttcgataacttgtttatcgatacggaagcccatttcattccatgggttatcggtagaaccattgaaaccttcctggagttcagcgatagaagtagccataccttcagcgatttctaccagtgcaccagcttccatttgtttcttaatttcagcatctaatttatctgcatcagttgcgcttgcactaattgttacttgagcagaagcttgcagatacacagtaccagtgtcctggaagaagtgagtatagatatcacctactgtggtttctgtgctagcagccagagctgggaatttcttagcagcaccctgaccagagaacattgcatctggaccatacattgggtggaatgcttctttagcaccggcagcgatcggatctttaccatataccgcgcggagtgcgaatacctgaccggttgggctgctcatcggttgaacaccgcaaatatcgaaagcaatcaggttaggaatagcacgacgtaccatacccataacagccgggccaatctgagttactgcgccagaagtctgacctgcagcgatgttggtagcattgtaaccgtggtcaccaccgatttcagcttctgttaagaaagaaccgaatgcctgagcaattttttcgtctttatattccggagctgtctggaaatctttttcctggttttcaaagattttagcgataatcgcttgtttgctattagcaatttccggtaaaccttcaccttccagtaatggcttccatttgttcaaaagttcagctttagttttgatagtcatttgtgttaacctttaaaattagaaacgagatgcgactttcgcatatacacttacaatatcttctgcaccctgtgcagctttatcttctacagcttcagtgacgaaattcagtccggctgcttcagtatcaggagtatttatactctcagtaatagtgctttcatctttattagatttcttcaccatttctacgattgcactcaatttacttgagaatgcatctgaataatccataccttcgaccagagcagagactttttctttttgagactcagtcagatctttagtactttcgctcaatgccacttcacgctgcacataattgatatatgcgtcacgcttattgagttcttcgaacagacgagctgattcttctttatgttcttgcagctcttcttccatttcagctacaacatcaactgattcttctggaacaacaacgttgtgttcaacaaagagctcttttaatccaccaagcatggattcaaacagttcggctttgatgcctttatcaactgctaatttattttcagcgagccattctttcgcaagatggtcaatgaatttagaagcttgctcagcgattttcttctcagctttttcttcggcttcttctttatttttttctacttcttcttctgctttttcagcaattttagcgatatgagattcagctaatttaacggcgtgctgcttgacggtagcttcgaatacagtgccgaaagtttcttttgcttccggagaaatattaactgattcgaaaatactatcaagagcaacggaagcatcaattttctgcgcttcggcaatcagttgttctttaagcattttgtagtcctgttgtttagataataatatttataacgcttttttcatggcctctgcgagagccatataggcgtcatcggcacttgtatcggcttccgccgtctgtgattcggtaatttccttaggagttacccatgcatctggagcacttggaccccatactgcatcaacacctacagttaatttgaatccttcgtttacgatacgataacctttatttgtgtcagtcaatgaacctaatccacgagaagaaactcctggaatccatccggcacgaatattagctgctaatttatctccaggaccatggtcaccttcaataacacgagctcgtccgtatacgtcatttcctttccaccacatatcttctataatgatagcggcttgcatcgggtcaacattagcgcgtggaggatgatttaattctccgagagcttgtttagttaaaacttgctcattaatatagtcttttaccgctttttctaatatacgttttggataaagacgtttatttctattgacaacttccgcttgcatgaatattccttcgatgtataaacccggttttaaacctaagtcttttccatcatgagattcaagcattggcacgccatcaataatttcgccaggttgaccccaagtttcaattagtaattggggttcattcattagcttaatcctaatgctttacggcgtttaagagcttttttacgcttacgctgagcacgagattgacctgctggattggcaatcttcgttttggtagctttacgagcaatttgtctacgttttgctttagacagcccagtggtttgaaatgcattacgttcacgcgttttgcggtctttagtgcgagtaatttcaccacgggcggaaacatgtttaacgataaattcatttaacggcatattttcattaatagaagctaatgcaaccgctaaatcagtttcatcatcaagcatattctcgacaattgtatttatatcgtctttatttaaagcagaagacaattcgtcaaagcgaccctgtgcttcaggaataagtgcttcgacattctcgagaactaattcatgagtttcagggatcagaagcattattcatcatcctcgtcttcgtcagagtctttgtcttttttgtcgtctttatcatcgctatcttcgtcatcatcttcatcttcatcttcaggttcttcaccttcgattaagaaattacgagcgatagcgattttttcttctttaattaaatcaatcgttcttgcagccatggcttcagcaaataatttacgagcggctacgaggtcgtttgatttaatagcttcaattaaaccttccattaaaaatcctcttgttcttggtcggggtcttggaaacgagcctctttagactcttcttcaatttgcttggcttcttgttctatttcttcatcagtcatctgcaaaatatctttcatagcagttctgtgagaaatatatttaccaataaatggttctgccatggttagcatattaattcttcgttccaaaatttctgcttctttgagctcagcaaagtagctatcccgatgaaattctatcttaatattatttatttcatcattccactcatcttctgtgattatacctttaagcaaaagatttgttttaagcggatctaggaaaacttcttcaaacttgtgctgcaactcacgaataaatttagcaaacgttaattcatcacgtgtaatgctagttccagaatcaaacatcacaccgccttgttggtcttgcggaatgcgtgaaagaggaacacgtaatgccatataaagagcttgtctaaaccaacgaatatcttccatattgccagtattatcagcaccaggaagagtatcaacttctgtcacagctttaccatcacggcgctgcaaccaatagtcttcggtcatagacatattatgctgttgattttttattttacctgttgatgcatcatatactacacggtttttcatcgtgttcataacatgttgcatgtgctcagcagctttacgagcaggcatattacctgtgtctacataccaaacacgacggtcaggagcacgagtaatgcgataaatgactacagcatcttctaataattttaattggttagcaggtttaacagcacgatgcaaatacccgatgatatttttaccgcaacaatcgactaatccagaatgggcataaacgacggcagctttaggaatttttatttttgtgccagcttcatacattctaccatcacatgcatatgactcatgagcagtatcatatataaaatattctttgtaacctttaactatttttgtgccagcttcagtttctgttataatttcacgaacatactgaacttggcgagggtctaatctacgtaattcttttatgccttcttttggacgttttggatcaatgattttatgaaagaaaattcttgaatcaacataccaacgtctaaaatgatcagaaccttttcgttgaaacgatagatgatttaatacatcactaaattcatctaacatcatatttttaatttttgggctaaatttagatttatccaaatttaacgctacgacttcagtatcatcttcatagacgatagcgtctgaaacgatttctgaaactgcattgtccacttcatagttattcatgagattacggtatgtatcaataagctcacgagtagttttcattcctggttcatgtgaaccaaaaattgtttggaatgcagcattataaggagaagcagcttcatttgcgcttacttcaaattctcttgctccatcatcaagctttggggctgtaatggaaacaagatcttctttttcttggtctttaaaatttcgttcgtccattttagcccatggagcaaacaaacttaatacattaaatttcattgtattctccaaatgggaattatagttatatttataatggacttctctgctttaagcaggatggggatttctccccattcattttattcccaataatcgagagcaagagttacttcaaaggtttgaatttcattgtttgaatcccaatctaattgaagttcacccacgttagtaggccatagacctttaatttcaatttcttttgttactgttttagcgtcacgagcatattgacgaacgatagcgctctttttatactctgcaggttttccaccagtaatttcgtttccttgtcccgcagcaatgctttgccaatcaacgaacttctggcgagcatcatgtgcctcatcgttcattactgtaacagtccagtcatcgaatgtacgatcgcctgctacgttaattttacggttcataaatccgactggaattttttctacaataccagctggtaaagcagtggctttacattgaaacgtaaaattttgtccaagataagaaatttctacttggaataagttaggtcgcgcaaaatcaccagattcaaacgctcgtgttacatcatctacaaacatattagcctctgtagtatttatatccctatgtttaacctagggtatatagaattaaagaattaaggatatagtgtatttatatggcctgtcgaaacaggcctttagaatgcaccgtattaaccagcaagaccagttaactcatcgaaatctgcaccagtagcagttgcgacgaaattaagttggatataatttatactacgagccggttggatgtagaatgttgcaacaaactcatttctatcaattactgacggagtgttatttgttgtatcgcaaactacacgatattcataaattccgccaagagctttaattccttgcaagtactgagcagtttctgtacggaatgaagaacgagtaaacgcgttgtttaattcaaacaaacgatattttgaactacgtccgatattcgttttcaacatattaaacagacgacgaacgttaatacgatcaaatggagaaggaacagaagtagctgttttatcaccatacaatacgtaaccatcaccacctgtaccagttactgggttgatagcttcttgatataagcggtcacgttgtgcctggcgagtttcaatagcaagtttaataacgttaagaatctggccacgattataaccagctggtgacatccaagtctgagatacgttatcagttcttgcgcataaaccagcaatatcagctgctaatggaacccaacgattcacatcattatatttgtcatactgatatttgtagttaccatcaattgctgcgtaggttgaactaatattaaagttattatcagtatatgaacctgcggcagttctccaattgactaagttgtcaacagcacgggttacaggaattccaactacagtttcacgcggtggtgagcacaatactaagcaatcctggcgagcatcaccaattgaaacgacgtgtttttggacagtagatgctgtttccaaagattcaccggcacaagaacccgcaataaacagttgaacatcaacggattcacggtcagcaaagaagtcccaagcttccatcaaatctcctgctgttacttcagcatttgatgataatccaccagacagagttaaaattccagagaatccttctggccagttttgtgcagttgcaaaaatatattctgagccgccttttgcgaaaaagtcatcgatatagatgttactatcgtaaatatctttttcaccacgcttagttgaaagaacaacgctttgaacaatagcatcatttcgacgaactataatagcgtactgtgagtcagtctgcggcccatatccaaatactgccttggcagtagatgcacgagtaccaccacctggataaattggcagtaatgcagaagcgcctttcgcatagtcagctttagatacgatttcaatttcaattttatcgcctaattcgcctggatagagagctactactcctggaattccatatttttcaagattttcctgaaaattaactgctgtaatagcagtttcagcgctctcgatttcagctaataaaataccggaatcagtaataatttttccaagagttattactgcagctaaaccggaagaagatgaagaaatttctgcagtccagttagaacctaatgttgggtattcgccaacttctttagctttagcaataatttttgcagtaggaatattaattttcttaatttttccatctgcgtctacttcggtaattttaccttcagtttcaatatcatctgaaacatatttgaccgtgattttatctccaactgcatagttactacccggggtagaaattgtgtattcaatattaccagcaattggcgatgagtttttagcggtatctctatcaacagcacgaactactcgtaagtcatttccgtactgcaagaaattcatcgcagacataaaatagtcagcagtttcagcggttggttgaccaaaagtattaactaaatctacttcatttgtaacctgtttaatctgaaaagcaggaccccactggaatttaccggccaaagctgctgtaccagtagagttattaaccacggtgctttgaaccgtagtttctttgagctcaatgcccggagataataaagtcatttttaatcctctttaatatgctttaatatatttataccattgacataccatgagatactggaacatactcagcagaatgaaccgaatcaacaaatataactggagcgtattcatcacccatatcttggagttcttttgaaaacacttcagatgctaatcgcatgtcatctttgtcagcataatcaataaattttgattgtgttgataaccatccaaaaattactaaagacattactaaatcgtcatgataaccttcttcagccgcccaagacacgcctttttcactaaacgttctaaactcctgaatagttgcacggtgatgaataataagcttatctttttcaataaggtcttttagcgtggaacatcctaccgctttcgtgcgtttagtttgtttcattcctaaatcagtatatgaatcgcagataacaccttcgtattctaaatccatataaagtgatttcgcaactgacacaccagtactatttaattcaatataaactgggcattcattgtattctactaaataacgcataacgatgtcaggtagaattaaatgagaaatagtgtttgagtgcaaaacaccaacctgttcccacacatcatcggtaacatcaataatatgtaaagcgtggtaatcttgcccgcgaccttctgagcagtctagagttgcaatatattttctatctggttcagggcttttaaatcgatgaaaaccatgatcatctggtgttacttcaataaaatccataacagctaatttcattcctgaaattagtgttccagaagtcccttcaaatgcagctgtgtgttcttgacggaattgcgctaaagtagaaccattgatggtttgtatgctccattgccatccatcatcaaaaatatcttcgtcattatatagacgttctttaactgaattccaaatagcagtgtatggttcaaatcccgatttaccttcaacagcagcagtccaaatatcataaaaatgatttaatccattaggagtcgtagtaataataattttagaacgacgaccagatgaaattactggctgaatagcaagccaggaatcatggaagtttggaataaacgcacattcgtcaatgtaaatcattgcgaacgagttaccacgaactgcgtcaggagaggaagcataggctccgattgaggaaccattatcaagttcaattgaacccttattccattcaacaattcctggttgtaaaaagtcaggaagcagttcaattgcttgcttagtacggtctaaaacttccgcagacattgagcctttgtgcgcaagaatacctacagctttatccttgttaaaacatacaaagtgcgcaagaaaaatagctactaccgttgttttaccgagctgacgcgatagattacaaacagtcatacgtttagatgacattattttgagcatatcacgctggtagtcacgtaattgaacctttatgacaccatagtcaatatgagtaatggcacagtatgtttctgcaaaataaacaatatcgtctcgacattttttccattcctcaaccatttcacgagtccattgtgttttaatattagctcgtttcaagttaggaagacccatataccgagatcttttattattcttatctttataagtttgaaataattcaggtttgtcagaattatttggaatttttactattttatgcagacgaaggtaatcactgaatttttcaggataccattttccatcccattgagattttatccaatgaattccatcttcatcttttctttccgctaagcttgggtgttttattaaaatttttccagcttcatttaacggatggaaatcatttaatgcattaatcggttgttccatttatcaccttctcacgagcttcttgagcctcgtaagcatcaccaatttcgtccattaattctgttggtgaacccatgaatactgtcgcattctgaatattcatttgacctgtaggaacagcgcctttggtgccaacctgctcagatgtaatatctttcatatctttatgaagcttcagtatttctctgttcgtcgtagtcatttgccccataagagttgcaaatacttccatgtgacgaggagaatcagcattctttgctgtctcaagaaaaatcttggccgcgtccattagcatttgttgttgaaaatgcatatttcgacgaactactccataatcatcttctaaatctggagtacggttttgtggattgcttttaacttctactaattgcagaggttcatatactttaatttcctccccgtcaattccggggaggtcagaaatatctaaaagtttgtttatatcaagaccttccataataacctctatgttcttgggccaggaggttctggcggtgttggtctatttacattactagtgaaagtttgttttactgttccatcccagtcttctgggtcaatatctcgaggaacaacttcgctatcgacagattcaaaaacgccttcgccgtcaggcaaatctcttgtgttggcgtgaaaatctgtataagtagtacgaattaatccttctgcatcatctactggaggatacatccatccatttacttcaaatgttagtgaccattcaattctacgacgagataaattatctccatctatagattcgtctatagcagcagacatcagtacaattttaatatcccttttaaatggaatatcatttccaaactgttcgtacatagttgtattaaaatgaggctgaaaatatggaagaatttgttcaactatttgaaacatatcgtcttcgtagcgagtaaagatactcaattcataaatcattttaataggagatggattatactgtgatactacggaagttgcgcctttttgcagtaaattctgatttaaaatgtttgttttaaatggagcattatagctaaaatcaactaaatgtaaatttatacgaggtagaatagtttcaactttagctacatcttcttgtgaatttatcgatgtccatttattcaatttcatcatgaagtgttcctttgatgcatacgtaataggaacacgtataaacttatcaccagattctaactgacgtttgatttggatatttgaaaacaaatcgcccatcaaggtagcatatcgtctaaaagacgaattataaaaataaccaaacatgatttctcctaatctgggctttaattagtttataatatttattaatccatgaaatcattatcaaatgggctagattcgaaagattttcctctgttattgacaacaacataaggttcaacatattctttagcttcagaattaatttgatctacttcagcatattgatcaatattaatatcatgaataccgttaagattgcgaacaggatttagttctaattcactaaattctggaatgttaattccttcgtttttctgtagaactggattaatttcttctccagaataaatgaatttacctgctgtaattttacgaatagcgttttggcctaattgataaaatgggtcatatggttcaacccagttgatttcaaataagctgttatccataggaaaatatatcaaatcaccttccttgggttcttttccatttacttgatgtttaaacaggtttggattaatggacaaagttacttcatcctgtacttgcataccaaagttaccaaagaacgatttagctccttcatatccttcaaatgaatttaaatatgcagcaaatttccatgctttagtaaatttattttttaggtcttcgccgaataccaaatcaggggaaacatactctcttggaacataatagcattctacacctcgcatttgaatgctttcagctactaatacatcagctaatatttggctgtttttataatgattgaaatttacataaggatttaatatttcagtttcattggtctgagaataacctgtgcggttttccaatttagcaaaaagatttttatcataagtagccatattaacctacaaaaattccaaatggagggtcaagcaagtataattcttcgcgtagtgcttctttttctaaacgagcttcttctattaaacgttgtccatcaatcgtaacaccgcctggaagcatcattccctggtgacgcgctaaaatttgaccattcaattctttagctaaagctgttgcatagtctttcacccaacgattattgtaagcaccttgcttaacatttggatcttgaccaacaacacgacctactaaattatggtctggattattgtatcgttcagataatgaccaactatcttgtggaccgactgttccatatcctactgtatttccaaccattttgtttgtatcaatgtatgatttagtccagctttctacgataattaaatcgtatttttggaagtttcccatgactttgagctgttcatttgctgaattaaaccaaaagtctggaataggagagagcatatcttgcatcattcccatataactggtaagttgagtaaaataccccaaatcagcaccaaaggcatttggtccataaaatctattacaagacgttcccataccaccattaataccagccattcctaaaagaaagtcagtaaaccacggataagtagcgttaccgtccatagatgttattgatccaacatttgtgcgtaaaatacgagttactgcaaatacgttggaacctcttaaatcaaatactccagtcttatatttttcttcatcgtcccctacataaaacacatgaaaacctttgttgagtccatcaaaatgatattcaccgtataattctagggcacgctggatgcaatcgtagatttgatcgggtgttaactcaacattaataattggagcccctaaacgtcttagaatgacatctttgagttcctttggattctgagaattatatcctgacatttaaaatcctttggggccttgcggccccatgttatgctggtgataaaaaggtagaaagtaatacccattcgccgtctttacgaacgtaagcttgaccatcttttggagcttcaggaatataacctgcttcctgcaaagtctgaacatccccctgtaatgaagatacattacttttaatactacgcatttcttgattaattgaagcaatgttagtctcattagcttttattgaattagtcaatccgcgttcttcgacagttgaaccatttggatttgttccatttactaatttatttaatgctacaacttgtcctttaattccggaattgttattaccaatttcaacttgtaagttttgaacatcattgttcaatctattaacg
